United States Patent Application Publication US 2007/0020625 A1 - sequence listing, part 5

SEQ ID NO: 5834 - DNA, 5648894 bp, Photorhabdus luminescens (residues 1-1,882,965 of 5,648,894)
  misc_feature (1135941)..(1135941): n is a, c, g, or t
  misc_feature (3459194)..(3459194): n is a, c, g, or t
  misc_feature (3474971)..(3474971): n is a, c, g, or t
  misc_feature (3540963)..(3540963): n is a, c, g, or t
  misc_feature (3600417)..(3600417): n is a, c, g, or t
  misc_feature (4864869)..(4864869): n is a, c, g, or t
  misc_feature (5648878)..(5648878): n is a, c, g, or t
aaagcacaaatgaaacttagctggacgccaaagcggttaagggggcatacgattttgcaaatacagcaaatgtagcggctaaaaatgctcatgatgaagcgaacagggctacagataatgctaacagcagattggcgaaaaaccaaaaatggcgcagatatccctaataaaagtgagtttataaaaaaccttggtttaacagaaaccgtggagttggcgaaaagtgcttacccaaaatccggtggtgttttgggtgggtacttggatgcaacagggtctatttccggcagaggtgtgtatgaatacccaagtattcgtgtttatagtgctgtaaacaaaccgtcaccgggcgagctaggcgcatataccacaggtgaatgtgatgggcgatatggcagcaaaaatatggccttaaagtctacaaatggttggtggaaatgtggcgatactggagtgatttatcagtggggagtaactcgagttctagagcctctagagattatcacagttcagctaccagttaggttctctaatgcatgtgtgaatgtaatgttaacagtgaatcgactaggagccagtggtggtatagctaatggttacgccgctgttctaagtccatcttcattcaaattgactaatgactatgctaatactggtattagtgtaggttattattggttagcagtggggtattaattatgtattattacagtgcaacaactaacgcattttatccagccgaatggaaacaagactatatcaatgcaggttcatttccaaatgatgcagtggaagttaatgaggctattttcattgagtttgctggcagtattccaccagagggtaaataccgaatagcgggtaaaaatggtttaccagaatgggcagatattcctccccccacaaaagaagaattacagcaacaggctaaatttcaaaaacagcaattaatagctgaagcaacaaaccaaatcgcaccattacaagatgctattgatctaaatatggcaaatgatgaggaaaaagcacaattagtagcttggaaaaaataccaaatatcactaagtcgtattgatgtcacattagcaccggacattaactggcctaaaaaaccatactgatatgtatttttgttatcgggctgcataagcagcccttattgttgtcattctggcatctcaggccatttaatatcagggaccaatgaagtgtcaacacggttcagcaataccagatactttttccattcaagtaacaatgcctgttcctcttccgaagccaattccgtatcaacggcatattggagtaacgtaatggtttcattagcttgtgtacacagtgtgccgcgtagttgttctgcctgctcaatctcactgttctttattgccgctttgtcagccacccactttgagccatcccatttatcaaaatgagtagcaggttgttcgaatgtcagggttttgggtagttcacccagatcagtaatttcttgcggtaagcgagtttgtgtgttgtaagctgtttttccacggtaatcgggtacaatttcccagtgatttccgtctgccgtgcgcctgacagccataaaatcggattcaggaagtgtcggggtatctgtataggagctcgccggtatgcctactcccttcattagatattctggtgtcgtgccgataaattcccttgaattaggcgctgcatggtagattgtcagccagcccgctttttctgctaatccatctttacctaatgtggcaatctcatattctaaagagtatttttgtgtattcattatgctgctctcactatgtagttaaatgcaatgttgcgaggtctgttctctgaagcaacagggacaactcgtgaagcatcaaagagaacttgtttttgccagacatctgtatattcatttcctggagccttttcacctgaaagagaaaaacatcctccataactattatttccacgtaaaattgtacctggggtataaccagtaatattacgaattgcatccccctgatgagttaaaaccccacgaccacgatccacaccgcgcccatcatcccagccacgaataaattcaccgcgcaaatcaggcagcacacctgatggataagctatagctaattgtggatatagtgatttattaaatgattgaccgttgcatgcgagataaccagcaggcacatttggtaacggccatgggatgggtgagccgacagatatgttgatatcatcaagtgttgctaacgtgccggatttttctggtgttgctaaagtatatttgcgattgctgttttcatcattagcgtatatcgtcaaacgattgccagctgttccttcaataccgataaaatgcttgtttgctgctctgaattcgatattcggccaattcgatccattgtttattcttaaggtgcctgtttgagcgcttaatgtactcgaaatcggtaaagcccccacatctccggcattcaaactgacatccccactcaacgccttgccattaattttccggctgttcggcacagcacttttcgccaattccacggtttctgttaaaccaaggttttatagaatttataaattaacaataaatcgtgttgaagcagtgtgctggggcattaaatggggattgaaagggtaaaaactgggtatatctgtgtgttaataaatgaccaaaatgacgattatggggaacagaattgcaaatggtttaattgtgaacagctattgttcataaaataacctaaaaatggtcaaagtagagcacatatattggcaaaatgcgtgcctttcccaatcatggtggaaacagattggctatgatctgtattagtcactatttttttctgatttgcgtattctgattctggagatttgttataacgaaataaactgagagttacctgtaatcttgtatgggatttggtaaccatatcaaaacaggtaactctcaattttagataaagtttcaactaacacatccaaatttatttaacggaaagctctatatttacacttcgatttcttacccaataagcttggctgttataacaaatctgtcctccgcaaatagcattttcaactatatcaggacaccctttaatcaatgtataccattcagggccagatccatctgaatttgcatgaccacgaccatgccgaaatgttagtgtataattttctgtgtcggtattggcaacattaatataactaacactccaatcgacagttttagtttcatttgtacatccatctatccagttattattatcctgtaaatttcccagataggttttacctgcctctaagcgtattttttcatctccactatcgtacatgcaattagatgattgcgtaacaagagtaatactctttgtcgctgatgagtttttaatttgtagtgcatatgtggctgataaattagaaattctactttctgaaacttctaatgttgcctccttatcggtaatgttttcttttgtctcagcagctaaagctaattgtgttgacgaagctagaatcacaatagttgtaccaattaacgttttcaaagtgatcatattaataaactcctttgatgaaattattcggaacctcattaggtgatttttgtgggtcaattttcacccatcagatagcttccataggatattaagagctgatcccagtagagttattttatttgtacttaagcaagtgttgttggacgttattgatatcgtaattataagtatacccgttatccttcaagttgcctctttgttggctgcgctcgctcaccccggtcacatagtttgctatgctcccggggattcactcccttgccgtcgcgatgcatcttgaaatccatagggtatataattcatatttttatctgttgaattgtttttttaaatgcacatcctgatgaaatgtttgtgaatgcatcttttacggatgtggtttattatgtaaataataacaaattggttttatctaatttcaaaataattccatcaattataaaaacatcatctgtatgtttgttgtattaatatgattatatacccgtcatctttcaagttgcttctttgttggctgcactcgctcaccccggtcacatcgttatctatgctcccggggattcgctcccttgccgtcgccatgcatcttgaaatccatagggtataggtgatgtttatcatattaaacttgaaaaaactgagacgttttaattgaattgatatttgtcagtaaaaatgaaaaaatcagcaaacgctctgaaaaatccgtcctgagtttattagccacgctgagtacgataatcttttggctagtggtatacaatgctgaaaataaagggcttcacctgagatatcaggcaaatagccttaagtcgagacgagttatttcttatttgatattacggagaatgtcttacgacattctccgctaattttactagtgatagttctcgataatgtattaaaccatctcgacaaaatctatcgaaataaggttttgatttattaatgctgagtttatggggattcccctcagcgtatttgcgaggtcggtttttaacttcgtttattatttaaaattcaactaatcccatcgaacccaataaagcggcaattacaggaattaaaaatgctaacgctattaacgtacatataattttaattattgggttcttgtatttatacacagcataggaagatattagcccgatggggacagtgatccaaccgcatacgaaaagagacataaacacataccatccaaagccttcaaaatacatcacattccctcatgaacctattgtagattctcgaaatatatcactaatcctatcaactcaccacagcccactcgtaaatgcgttgaagtatgtgtccattcttttctcggttgcctgttcactgtgtgtctttgaaaaaccaccctaccgggtgagtaataggtgatatgtctttagaagataagctttgcaataccaattgccagaccagttattcctaacattgtggcggcaatccatttggtttgagttgcaatagattggtgaacctcaattctcacagatgcgatatcttcctttgttgcatagttagctttcataactgcgagatcggttttgatgaggtttagatcatctttaagtttttttactctgatttcaaacatatcgttgctgcctccatcaccactattgccgcctgttttaaatggcaaatcacttcttatttggaaccacgtgatctcgtttattgattgctatctttccccatgatagcagggtatttctgttttacccactcaagaacttgtgatgtatctatcatcattacagtcaccgaatgcagatagagcagaactctcatggtgaaaaagtggcgcttttggttttggattttatagtcacttagaagggcgcttactcatcctgagtttattagccacgctgagtacgataatcctttggttaatagtatacaatgctgaaaataaagggccttaacttgagatatcaggcaaatagccttaaatcgagacgagttatttcttatttgatattacggagaatatcttacgacattctccgtcagattattgacaaagtgctggtttttttatccggcgctctgttttaattcagctccgttcaccagacggagcttgccgccatgttaaggtattggcgtaaacaggggagtgagacgagttaaatctatttcctgtttaacttgtgccaagctatacgcttcctggagtctcagccacatttccggcgtactgccgatcacgttggctaaacgaacggccattcctggcgttactgccgcgctaccttcaacaacacgcccaatagttgacggtgagacatccagtgcacgagcaagcgctctaagactaatatttaagtgctctatctcgtcagagatatagcgccccggatggggtggcatacgtttagtcattaatgatagtcctcgtagttcagtatataaacatcaccatcgttaaattcgaaagttaacctccagttacccgatacgcttaccgcccaaatactctttcgatctcctgtaagtgggtgaagttgaaaactcggtaaacttaaatcattcaggccgcttgctaaatctaatgcgtttaacagtaggtctagcctgttagcgtggtgtgcaacaattcccgccgtggttcccttctcataatactttcgtagccctttatgcttccaacttttaatcattgtttgagtcctgttgcgttacgagagacagcataacacgtgtcgatcattgcgcaacaacatttttctgatgaaataatatcagattattgacaaagtgctgtttttttatccggcactctgttttaattaagttccgttcactaaacggggcttgccaccttgttaagaacacccactctccagactttcccgccagaaacactctcgcttgacgagctggttcctaaaaatcatttataccctatggatttcgagatgcatcgcggcggcaagggagcgaatccccgggagcatagataactatgtgaccggggtgagggagtgcagccaacaaagaggcaacttgaaagataacgggtatagtccgtcaagtcgatgccgctattgatttcgaatttatccgcgaattagttgccccattgtattgccacaataatggctgtcctgttatctatagcccaaaatattaagaagatagccttgctggtcgcaatgctgtgttgtttttatctcaggagagcgagtattttattgcaggataggcgaaaataacgccttggtggaggattacatcgggttaatgaggaaaatggatggcattatgattcataataaaagaaacaaaccccgttattttcaacgaggtttgtcagcggtatggtggagaatatcttacgacattctccgctaattttactagtgatagctctcgacaatgtattaaaccattttgccaaaatctatcgaaataaggttttgatttattagcgctgagtttgtggggatttctcagcgcaaatgcaggcccattttaaaaatttatttttgttctccaaagtcctcaaaaaatattgcacctatgttgcctgcttgatctaagccatacatacaaaagcgtattggagagtctttctttttaatcgtaatcggtactcttctataagtagagtaatttttataatcatcgcattttgtcgattttcttgggcctgctttataacgtatatcaacaacttcccaaggtctaaatctgaggtcgataacccagctatcatctgtttgaaaaagtaatgttgaatccggtcttattcccggaagggtgttatcaatttcacgtagttttattgatgcgttagatgtactctgccagcgtttatttgcagaatgttgcccaatgacacacatggtatatatcccttctttggaaggaacggtaagtttttccagcggttgtgtcgtgactggaacaggtttgctgtatcctttaggatcggtacaatcaacattactcgcaagtcctcttttatagcgaatattatcaaaacctttctcttcaaggcgtaaattccaggtgacaggtttgttgttaacggtaccctttgtaattaatgggccgctggtgttaatagtgatccctttgccatcatcaaatttacttaaatccagttttccatcagaagtaaatgcacgtgcaattttatcaataggcatataatagctggcacctgtacgtgagaaactgtgatcgataataaattcacaaggccggttaagaccgcaaccccagtaacttcgatcgacggtggtatttaatacaccaattatcttggattgatcttttaacataaccggtgaacccgaagttcctcctgcaacaccggcgcaattaaccgcagcggccggagaccaagcccatatgccttcatatacaagcgaagcttttccagtaatgttgcaagccgaatagcgcaggtaacgtttatcactctctatgccattgaccggaatatgagcaagttcaatctgctggctggttaattctaatgccgatggttcatgatctttttgtaaggttaccggcagtattccgcgctttgccaactcaccatacgttgctttaagtctgaaaaccgcaaggtcgccgcctttcattgttgcgtataaaactctatcaacatcaacaggttggtgttcattaattaagtcaatgaagtagtttggcgtgtatgtccaacctgggcctacaggttgatcaatgatgacttcattggtatctaatgaagaatcaaaacaatggcccgcggaaagaataagtgcttgttgattggcatcaggggtttctgaaccggcaataagtgtcgcggtacattggccgcgaccgctcagttttccgacatgcttaaatcgctcagcgcccggatcggtagattttaatagtggagcttcgttgctggtattgtcttgcagatcagcaatatgctcgctgttattttcgggaagtgcttgtgcaaaaaaacttgctgatacaatccctgtaataagtgtagctaaaaaaattttcttcatatttttacctcgtgttgtttacattgttaatctttccatgtaatggaaacagacattcaatgaaataaagtttatggctaagttttttttagaaatttaataaatcctctatatgagtatttaatgtttactaatttatgaattaatagacggtttttttagcgcataagatcattctattggctgcctgttatccatagccaataataaataacataaaaatcagctaaatagttttatatacggcaatagagctataacgttcaatggaacgaggacggattataaagatttttctggtataaattcgttgttataaaggatgagttgattaaatgggagttgaattccgggagaatgtatatttattagttgttactaaatttatcacccggagcatttgttgtggaataataaaagtgttagcaaaataattttagtcttgccggaatgagttttaattcagtttgcagtgtttttaaatagtcaatagcaatagtggctaaaatgggataaaaatcattttctagtttggttgtctgcatcaattccagataatggtaagcccaaggcagtaagtgctgttctaacaatgtacgtgcagcgggtttatgtccttgttccaaaatgtaaaccaaagccagcagtatcagactgaattgatcttcgggttcccgttgttcactggacatgacaatattctgttttgccagaaattcccggtaagccagtgtgcttgcacctgataacacgttttctctgtccagataaaccgatccccaaggtgggttggcataacgccttgtccttggaacaagatagagtcgtcatattgtagagattcggctgagaaggtcgcgagcttttttgtcagattttctattttgcggttatttgactagggaaataatttatcaatatcgataagcaatggaattagtgggcggacttgttctgatttcggtgagtaataaaaacaggtgccaagaatacgaggtatggaggtatataataacataggtagttctcattgtgatttgtggttatacagatgatgtaaggagcgattttatgataagaaacatcataagcttatgtgatatgaatagatagttgattatgatcaatgattaatctgttgctatgttgttaccatctttatcaccagattgatggtgatttttgttataaagcgcataagtttatcgccgaaaataataaaattagccgctttattggtgtgagaaatatatatttaatctgcatttaaattcaatgaatttaataaggttattatggtaaaaatgaatatatatcattagttatctaataattaataacttgaaaagtagaccacgttaaaaataaatagaccctatggatttcaagatgcgtcgcggcggcaagggagcgaatccccgggagcatagcaaactatgtgaccggggtgagagagtgcagccaacaaagaggcaacttgaaagatgacgggtataaaccgccgttaggttaataccacaccttaatggtgtggttgggaaggaggtgaaagtcctccgcagcccccgctgctgtgatgctgacaactccgctgatgccactggtcggaaagactgggaaggttgcggggaagggtgacgctaagccagaagaccgacctgacaggcacgagacattaactccttcggtgggaagcgagttgtcatccaagtggtgtgcgcggtgttggcacgtcttattggcgctccttttccgatcgacatatcgggaattttctatgcaatggtcaggtaggaaggcatttgttatcgcgggtacgggtagtggttgtggtaagactacggttacccttggcattttgcgagcattgatgttgagagggttgactgtccagccgtttaaagtggggccggattatctggatagcggctggcacagctcggtgtgtggcgtagcatctcgtaatcttgatgcatttatgctgccaaccgcgacgcttaatggtctttataatcagcacatgcgtcatgctgatgtcgcggtcattgaaggtgtgatggggttgtatgatggttatggtaccaacccaaactattgcagtagcgctgcaatggctaagcagttgggatgcccggtgattttgttggtggacggcaaggcagtatcgacctctgttgccgccactgttctgggtttttgtcgttttgatccctctctaacgattgcgggcgtcattgttaaccgcgtcaattctgaaaatcatttcgaacttattcgtcatgcgattgaacattattgtggtgtgccggtgctggggcgtttgcccgtgatgaaggatgtgtcattaccgtctcgtcatcttggccttattcctgctcaagagcaggctgacaatgatgctcgttggcaacggttggctcagcaggtggaggcgcatatcaatcttgatcgtctgttggcgctttgtgattgtcctactttacccaagggtgaggcaccatcattgcctgatcccgcattggctgatggcttgacgctagcattggcagatgatgaagcctttaatttttattacccagataatctggagatgttggaacgggtgggggtccgtattcaccgttttagtccactgcatgatcgccgtttacccgattgtcagatgatttatctcggtgggggctacccggaaatatatgccgctaagttggccgccaatagtgccatgcgggaagctttacaggatgcgcattgtcgtcaagttcccatttatgctgaatgcggtggcctgatgtaccttgggaaatcgttgaccgatggagaaggggcgagtcaccagatggccggtattctgccgggggaaagccatatgggtacgcggttgatgcgctttggttactgtcaggcacaggcccgttttgacactttgctggccgcagaaggtgagattttacggggccacgagtttcattattctgattttatcagctcagtgccttcagtctttgactgtactaaatggcgtgacgggatggcaatacagcaatgggccggaggctatcaggtacagcagacactggctagttatcttcatatccattttgctcagcgtcctagtctgcttgatcgctggttgaggtctgcgaggaggttattgtgacacttgctgcctggtttgctgctttcttgctcgatagctggttaggtgatccgccgcattggcctcatccggtgcgttggattggtaagctgatctctttggtacagcgggcagttcggcgctgttgtcacagtgaacgagcattgaaagtcggtggagcagggctatggatagtggttgttgggctgacttggttggtgagttggggatgcttgtggctgatgaacgccattcatccttgggtcggctggctggtcgaagtgtggatgatttataccctgttggctggccgttgtctgagtgataccgcgctagaggtacatggcgtattacaacagggcttattggatgagagtcgccagcaattgtcatggattgtcgggcgcgatacttctcaactggatgcaccgcaaatcacgcgcgcagtcgtggagacggtggcggaaaacagcgttgatggggttatcgcgccactgtttttcctgatgattggtggtgcgccgttggcaatggcttataaagcgattaacacccttgattcaatggtggggtacaaaactcaggaatatcacgccattgggtatgtttctgctcgcatggatgatctggcgaattggttaccggcgcggctgagttggctgttgttaagtgcggcggcttggttcattcggcttgattttcgtcaggcactgcgtattggctggcgtgatcgttatcagcataccagtcctaactgtggctggtcggaagcgacggttgcgggagcgttgggtatccgccttggtggtccgagttgttattttggtgaacgagtagaaaaaccctggatgggtgatgaacgccgtaaaattgcgctgacggatatcccgctcagcatctatttgatgatgatagcttcgcaactggccttactgttgtttgcgctgttgcgcttactgttggtcggcatggcttaaaaaagggcaacaatatgaattacctccagaaacctcagcaaattgaacagaatagcttcgcaatcattggcgatattattgccagtgagcgccccgattatcgttttgttgatgagatgcaagaagcggtgattaaacgggtgatccacaccaccgcagattttgactggttggatattttatggttctcgccgggtgtgctgtcccgcatgacagaggcattacgtcggggatgcaccttgtataccgatacgacgatggctcagtccggtatcaacaaagcactgttacatcagatggggtgtgaatgccgctgctatatcagtgatccgcgagtggttgcgatggcgaaagcgcagggtatcacgcgctctatggccgcggtagacgtcgcactggcggaagagggggacaaaatcttcgtgttcggtaacgcgccaaccgccctgttccgtctgctggaaaggaaggcttcaccgttggcggtggttggggtgcctgtcggttttgtcggtgcggcggaatcgaaagccgctttgatgcaaagtgaactgccttgtatcgccgccgcaggtcgtaaagggggaagtaatatcgcggcggcgattatcaatgccattctgtaccgattgcaggaggcacaatgagtgacaccatgcaactagacagcatctggcataacggtaagcagtatcgcaagggttataccacgggttcctgtgctaccgctgccgctaaggttgccgcattaatggtgctgcgtcagcaagttatcgatcacgtttctattgttaccccttcgggtgtgacattacgccttaacgttgaacagccgttgatcgaagggcagcaggcgaccgccgctatccgtaaagacggtggcgatgatgtagatgccactcatggcatgttgatttttgctcgtgtcaccttgtgcgatcacggtgagatccatctgcggggcggggaaggtgtcggcacggttacccgtaaaggtgtgggattaccggtaggcagctctgcgattaatcgtacaccgcgtcagaccattgaggccgcagtacgggaagctatcggtcctttacggggcgcggaggtggaaattttcgcgccggaaggtgaagagcgggcaaagaaaacttacaacgggcgattggggatactgggcggcatttccatcattggtactactggcatcgtcacgccaatgtcggaggagagttggaaacgttcgttggcgatagagctggaaatgaaacgttcggcgggtgcagaaaaggtcattctggtgccgggcaatcacggtgagcgttttgtgcgtgaacaattagggcttgatggtcagctagtggtcaccatgagtaacttcgtgggttacatgttgcaggaagcggtgcggcttgggttccgccatatcatgttggtgggacatcccggcaaactggtgaaagtggccgccggcattttccatacccacagtcatattgctgatggccgcatggaaacgttgattgcttatctggcactgatgggggcgtcgcaggaattactgttggaagtgagtcactgcgataccacggaagctgcaatggaactgattgcggaacacggcttgcaagcggtttatgaccgtattgctgaacgcatttgtgaacgaatgagtgaaatgttgcgttttgcggttaacccgccgcgctgtgatgccattatgttctcctttgataatcaaatacttggcaccagtcgcccattaaatgacattttggaggcaatgcgatgatcaccgtagtgggaattggtcccggcgatactgcgtatctgataccgcaggcacagcactctatcactgaggcggaggtattggttggtggtagacgccatctggagatatttagcggcatcacccacgaaacccgcgtactggatgcggatcttgctggtttgcttgcttggctacagaacaacagtacacgtcggattgtggtattagcgtctggtgacccgctgttatatggcattggcaaattattgtctgaatattttaccgcagatgatctgcgcatcattccgggtatcagttcaattcagtatctgtgtgccaaagctgcgctggatatgaacgatatctatctgactagcagtcacgggcgtaccccagattttgactggcttttgcaacacgacaaagtaggcatggtaacggatgggcgcgtcggtccgcgggcaattgcgcaggccattattgaacgcggcctgaaccgtacattgattattggtgaaaacctctctttacctaatgagcgtattcaccgtctgcggccggaagcggtggcgattgactatgacatgaatgtggtggtgatcctaaatgagagatgatgaatttttacgcggacagaaagtgccaatgaccaaagaacctgtacgtgcattggcgctggagcggctggaactcaatggtgctagccaattgattgatgtgggagcgggtacgggcagtgtggcattggaggcggcgttatgtttcccggcgctgaccgttactgccattgaacgcaacccggcggcactggccttgattgaggagaatcgtcaacgactcggttgtcataatgtggagattattgcaggagaagcgccgttagcgttggatgtgatggcggatgccgtatttattggtggcagtggtgggcaattgactgccttgatcgattgggcactggatcacatgtaccccggtggccgtttggtactgactttcattttgctgaataacctgaatgatgcactggaacatttgcggacctgccagatcagtcaattggagtgcatacagctacaagcatctactctggcgaccttgggtacgggtcactattttaaaccgaataatccgacttatctgatttcctgttacaaggagaagatcgatgtctgaatattttgatcctcgaaaagtgtggtttgtcggggccggaccgggtgacaaagagctaatcaccctgaaaggttaccgtttgctgcaacaggcgcaggtggtgatttatgccggttcactgattaataccgaactgctggattattgcccgccggaggctgagtgtcatgacagcgccggcctgacgttggaacagattgttgcactgatggttgatggtgtacgtgcgggtaagctggtggtgcggctgcaaaccggcgatctctcattgtacggttccatacgcgaacaaggcgaagttttgaccgaagcgggtatcagttttgtctcgataccgggtgtcagtgctttccttggggcggcagcgcaattaggggtggagtacaccgtaccggaagtggcgcaaagcttgatcattacccggattgaagggcgcacgccagtgccgccgctcgaacaactggaatccttcgctgctcatcaaacgtcaatggcgatttatctttctgtacagaaaatgagacatgtggctgcgcgtcttcaagctggtggttatccggcaacgacgccggtcgcggtgatctacaaagcgacttgggatgaaagcttaaccgtgcggggtactttggcggatatcgctgaaaaagtacagacagcgggtattcgtaaaaccgctttgattctggttggtgcttttttgggagaggagtaccactattccaagctttatgatgcggggtttagccatgaatatcgccgggcatgaatcgattgcggtgttctgtctgacgccgggaggggtcagactggtacatcgattgaaaactcatcttcctctgacctgttttaccagcgaaaagttactggagccggggtttacgccttttaatggcagctttggcgacacgttgcgtgaggcatttaaacactattcggcgttggtggtggtggcggcgctgggcatcacggtacgcctgcttgcgccacttataaatgacaagatgcatgatcccgctgtggtggtgattgatgaagggggtcagcatgttattagcctgttatccggtcatgtgggtggcgctaatgcattgactcaccatttggcggcgttattgggggctgatccggtgatcacaaccgccaccgatgttaatggcatggcggcgctggacacccttgccacgcaattagatgccgatatgcaggattttcgccacgtggtgaaggtgataaatcaaatgctggtcagtggtcaaaaagtggggttgtggtgggatgaaccactgcttagtgaacgtgagcagtgtgatatccggggttttgtctcggtagcgtgtctggaagaattgccagaactggatgcgctggtgtgtatcacattgcgagatgcattgccggaattgcctctaccggtttacaaactggtgccgaagcgtgtggtggccgggatcggttgtcgccgggatacgccattgcaaacagtgattgagctattgcagcagcagatggcggaaaaccatttcgatctgatggcgttacgtgccatcggcagtgttgtgattaaaaaggatgaaccggcgctaaatcagctagcacaacgttggcgtgtaccgtttcagttgttcagtgttaatgaattaagtcttcatgagcaacgttttcctgcatccgattttgtccgccagacggtgggggttggcagtgtttcgcagcctgtcgcttggttgatgagtgaaggaaaattggttggtcggaccttgcgtcagcagggcgtcactatcactttgggggtatcacaatcatgttaacagtaatcggtattggaccaggcaatgaatccatgatgacgcaggacgcgattgcagcgatccaagaagcggaaattattgtcggctataaaacctacacccatttagttaaacatctaacgatggataaagaagtgattaagaccggtatgtgcaaagagattgaacgctgccagaaagcgatcgatctggcattgtccggccgtaaagtcgcgttgatcagcagtggtgatgcgggaatttatggcatggccggcttagtactggaattggtttgccagcaacagtgtgatcttgaagttaaattggtcgccgggatcaccgccagtattgctgcggcgtcgttattaggcgcgccgttgatgcacgatttttgtcatatcagtttaagtgatctgctaacgccgtggccgatgattgagaaacgtattattgccgccgcacaagccgattttgttatctgtttttataacccacgtagccgtggccgggaagggcatcttgccaaagcatttgaccttatgcgaccgtggaaagcagcgcagacaccggttggcgtagtaaaagccgcgggacgtaaaaaacaggataaatggattactacgtttggcgagatggatttctccccggtggatatgaccagtctggtgattgttggcaatcaaacaacttattgccgtgatggattgatgatcacgccacgggggtatgaattatgagtcatccggctatccatgttttcggtggtaccagcgatgcccggttgctctgtcaggcactagatgcagcaggagcaggttatcgtctctctgttgcgactgatgcagggagacaactggccggtgatattcagggagaagtggtggtggggcgaatggatgctgaggcgatggtggattactttgatcagcataaagtacgttgggtgattgatgcttctcatccttatgcagatgcactaagccaaaatgtgctcacagcatgtcgtcgtttgtcactgaggcttactcgctatcagcgtcccagtgagattgacttactgagccatccactgttgcacaaagtaaatagtatcgaggcggcttgcgacgttgcccggacactaggacaacggatcttgctcaccaccggcagtaaacaactggagctatatcagcgtttactaccgggaaaaacattgttggtacgggtattgccgaccgccgaggtattgattcagtgtgaagcgttaggattgggggtcgatcatattatcgcgttgcgtgggccatttacggctgaattcaatcatgcagtgtatgagttttgtcaccctgacgtggtgattacaaaagagtccggggccgaggggggatatcaacagaaagtggcgccctgtctggcgcttaatattccctgtattgtggtgtgccgtcctacacagactttacagggagatgaaggagagcagattagttcgctggatgagtttgtccaacacctagccagttggcaggaataatgagggcaataaaatgaaaaaagcactattaatcatcagctttggtaccagctatcatcaaacccgacaaaagaatattgatgtctgtgaacaacaattggccgcagcttaccgtgatcgcgatctgtatcgtgcattcacctcagagatgatcatccgtaaattaaaaaaacgtgatggtttacaggtggataacccacgtcaggcgttggagcgtttggtcaatgaggggtatcaggatgtggctattcaatccctccatgtcatcaacggtgacgaatatgaaaagattgtcagtgaagtgcgtacctttagtgatcatttccaacgtttagtggtgggtacgccgctgcttaacagttttgccgattatcaacaactgcttattgccctgaaaagtcagatgccgccgttagccgaggatgagcgggtggtgtttatgggacacggtgccagtcaccatgccttttctgcctacgcgtgtcttgatcacctgatgaattcacataatttcccggcattggttggcgcggtggagagctacccggaaatcgaccatatcatcatccgcttgcggcggcaggcgatacgtaaagtgcatttaatgccgctaatgctggtggccggtgatcatgcgattaacgatatggcatcggacgagccggattcgtggcgttctcaactggaagctgttgggataaaaacccaatcttggttacaggggctaggtgaaaatccgctgatccgcgaaatgttcgttcaacatctggcggacgcattacaggcagaacaacaggaggtggtgtgatgaatggaaaactttatgcgataggtgtcggtccgggagccagtgatttagttaccgtacgtgcagcgcgaatacttgctcgccttgatgtgctttatgcacctgctgggcgtaaagggggggatagtctggcgctttccattgtgcgtgaatacctgttaccccacacggaaattcgtacctgccattttccgatgaacagtaatggcgacgagaaacaggtggtatgggatgaagtggcgcaacaactgcaagatgaagtagccaaagggcggcaagtgggttttatcacccttggtgatgccatgttattcagtacttgggtctttttgctggcgcgaattggtcggcaagagtggctggaaattgtcccgggtatcacctcttttgccgcgattgccgcgcgtagcgtattacctctggcgatggaacagcaatcaatggcgataatgtcttgtactgcaccagaagctgagctggagcaggcattgcaaacgcatgattgcgtggtgctgatgaaagtctatagccgttttgccgccgtgagtacattgttggcacgcctgaatctgtttgaacatgctttattgatggcggatgcgacattgccaagtgagcagtgctggtgccgtttggatcaggtggacgctgatcaaaaattaccttatttctccactattttagtgaataaacaatggcatactgagaaataagtgctggtatggtagcaaaaatattcattgggttggcaatggtggcgaatattgacaaattggatacattgatcgccgggtcaaccctttccatcaggtaaggcgtgattgcgaactaagatcgctgctctataaaactgaggagcagctttttgctctgctacaccaataattgaaggagatagcatgatgggcttgtctttaatgttgcagggtacggcatctgatgttggaaaaagtgtactggttgcgggattgtgccgtatctttgttcaagatggttatcgctgcgcaccgtttaaatcacagaatatggcgctgaattctggtatcactattaacggtgaagagatgggaagggcgcagatttttcaagcagaggcagcgggtattgaaccggatgtacggatgaatccagtattgcttaaacccaccagcgagcgtaaagcgcaagtggtgttaatgggaaaagtggcttgtagcatgaatgcggtggagtatcaccagtataagcccagtttacagcagcaaatttgcgaagtttttcacagtctggcgagtgaatatgacgtcattgtgctggaaggggctggcagtccggcggagatcaatctgcgagatcgagatattgtcaatatggggatggcggagatggttgatgcccctgtgctgttggtcgcggatattgatcgcggcggcgtatttgcggccatttatggcacattggcactgctacgcccggcggagaaagcgcgggtaaaaggggtgatcatcaataaattccgaggtgatatcagcctgctccagccgggtattgaacagattgaagctttaactggcgtgcctgtattgggcgtcatgccttggttggatattgatctggaagatgaagacggcgtagcgctacaaacgggcaaatatgatggcgcgacagaaaaggcgctggatattaccgtgattcgtttgcctcatattgctaattttactgactttaatgcgctggcggtgcaaccggatgttcgcttgcgttatgtgactcaaccatccgcgttgcagccgtcggatttgatcatcttgcccggtagcaaaaacacattgggagatttgcaatggctgagacagaacgggttagcggatgccttgttaacggcacatcaggctggtgttcctgttatcggtatctgcggtggttatcaaatgctggggaaacggatcattgatggggtggagtcgggtattgaacagatggatggtctcggattgttggatatggaaacccgctttgctcatgaaaaagtaacgactagggtaaacggtaactgcttgttagcattacccggtttgctgtcagagtgcgttgagcagcctattcgtggttatgaaattcatatgggcagctcattactgggagcggatgcaactccgtttatcgatattaccgagcgtaacggccaatctggtggttggtgtgatggtgcggttaatcgagaaggcagtgtgatgggcagttatattcatggcttatttgatagcgctaattttacccgagctctgcttaacgctttgcgtcagcgcaaaggattggcggcttatcaaggggaaatactggattatacccactacaaacagactcagtttgatctcctggcgaaagccatgcgcgaacatctggatatagaacggatttatcaatgtatgaaaactcatcgacaaggttcggttccgtgatcttaatcactggcggggttcgaagtggtaaaagtgtgctggcagagagactggtggcacaagcgagtgaacaggtgttatatattgcgactgccgtcgtgacagacagtgaaatggccgaacgtatacaactgcaccgcgaaaatcggccggctcattggcgtacatgggaaggttatcgcgatctcggtgcagttatcacgacgcaaacccgaccgggagaagcgattatcttggaatgtatcaccaccttaattaccaacctattatttgagcaagcgggagagacgccacctgaacaaatggactttgctgtattagaggtggggattcagcaacaaattagcgatctgttagcggcttgtgcccgcatgacttccccgatatatctggttactaacgaattgggaatgggtattgtgccggagaaccgtctggcccgccatttccgcgacattgccggcagggtcaaccagcggctggcggcggctgccagtgaagtatttttgatggtatcgggaattgaggtaaaaattaaatgagcctgcgtttgtttcttgccaccttacaatttatgacccgcattccggtaccatcgcgctggacacagggagtggaaatcgatcagtacgtgcgaggtatagcgagtttcccactggttggattaatcgtcggtgtgctggcgtcggcggtttttaccttgctggctccctggagtggcgcgcccttggcggcactgggttacgtattagcgctggcgctgttaaccggggctcttcatcttgatggtttagcggatacctgtgatggtgtattttctgcccgtaagcgggaaagaatgctagagattatgcgtgatagccgtttgggaacaaatggtgggttggcgttgatcttgcttattttggcgaaagtgctggtggtgagcgaattatctctgcgtggcgcttctatgctaatggctttgactgcggcatctgttgccggcaggagtgcgattatcttattaatgtaccgccagcgttgtgctcgtgaagggagtggcttggggaatctctatatcggtcgggttaacggttatcaggcactgttgacattgttaggtggggcaatattgattgctctattgatacgctggtctggtgtgttggcattggcgattacgctgttggttatcgggttgctggcaatgtatctgcaccgccgtttaggcggtcagaccggtgatacccttggtgcatcagtggaagtcggggagttggtatttttactggcgctattgtgagtcatttcctggcaaaatacccaacccctattctcgctaagtgctggctgaaagaataactgtaataggtgcatattgcttacgggcggaaatctggcgactttcccagcgatcatgcgctgcttgaaggttaatccaaaaatcctcatccgtttcaaataaaccggctaattgcgtggcttctgcaacggataggcgccgggaattattcacaatttggccgataaccttgcgagaaacacccatcgcattcgccaactgttgttgagttattttcaagggtttcaaaaactcttcagccaacatttcacctacagtggtaggttctgctgttctggtatccataaagtttcctgtgaaatccaagaggaataataaaaccatatttacttcacgttctctgcctttcttcttttttcttcttttttgtcagtatcaatctttgctcattggcttgttgttggaggttctgaccgtttgatctgtaaactccgcatatgctgaaagcgttagcgttgggtggtatggcaggcagaaaacaacagggcaatcgggcatttttataacaataggtttaggtcttttagctggcatagtttattcttcccaagtccttatctggatttcgtcgtactttaaggtctccaggcggaggtttcaacatgaggatgatctcctgtgggagtcttgtcaaacggttatgcggaaaaacttataccctatggatttcaagatgtattgcggcggcaagggagtgagttcccctttgtttataagttaagaaactcattaaacgaaaacatttataatagtgattaaatgaaagacaaaaacaaacttattaagaagttggaaacaataaatgctgatactttcttcaagttcttggacgcgaagaaagtaactcgaatatgcccgatgtgccacagtgttggtgagcaagttattgctgagacaagcaaagctgcggttgctgacttgcttcatgggcaatcggttagcaaaacatttgttacttttttcagacacgcaccagaacaacctaccgacagtgatgctaattattattataaactcagctgtgataattgtggctatattaccactcatgaagtcagatctgtgcttcattggttgagtcagcaagagaaggaatctcatgatgagtaatatatcttatatgaattgttcgcccgtaagggcaagcatattcgtaagtgcttcggcacaaagtccgaagcgcaacagtatgaacgttgggtaatcgctacccaaaacggtattaaatcaatgattcccaagctagcaaaaaggctggcgagatatgtactacgacacacattcgcaagtcattttatgatgaatgggggtaacatgctaaaagacgagtctgaatctacgtgtttttgaattaacagctcttaaacacatctgagatagagtaacaacaatgcgactatttttggttcggcacggtcagacggaagcgaatctgagtggtgttttctgtggtatgacggatgtggagctgactgaaacggggataaatcaggctcggcaagttgcccgttatctatcggcagtaacattttcgcaagcgataagcagcgcgttacggcgggcgcgtcatactgcggagattattctggccggtcattcgttatcagctaatattgatacacaactcaatgagatgcatttcggcgcatgggaaatgcgccatcaccgtgatttgcaacatgaagacgcagaagcttgggctgcttggttagccgattggcaacaggcatccccgactggcggtgaaactttctcagcatttgcggccaggatagagaacgtggttcagcaactgttgacaccagaaagtcaggataatctgttgctggttgctcatcagggagtattgggcttgttactggcgcgtctgttggctataccgcctgctgctatgtggcactttcattttgaacaaggaacatacagtgtcgtggaaatccaacatggatttactaccttgcgaacatttaataaccggactgactggcagcttgagacacggaaataacatcatgcaaacactttcatcgatcattaatgcgattgtgccgttggataacgttgcgatggcgcgtaccgctactcgattgaatgggctggttaaaccaacaggtagcttcgggcgtctggaacatctggcgattcagctagctggcatgcggggattatcgggtcatcatattgatcgtaagcagattattgtgatggtcgctgatcatggggtttatgacgaaggcgtgactatatcgcccaaatcagcaacggctattcatgcacagaatatgatgaaagggattaccggtgtttgcgtgttggcggaaaatgcgggtgctgatgtaaaagttgtggatgtgggcattgacagtgatcctgtgccgggattagtgaacatgaaggtggagcgtggcagtggcaacattgctcaagggccggcaatgagccgccagcaagccgaagatttgttattggcaagcgcatgtttaacgctggaacagattacaaatggcgtgcaactgtttggtgtgggcgaattgggtatggcgaataccacaccggcggcggctgtggtcagcgtctttacggacaacgatccacaacagattgtcggcattggggctaatttcccaagtgaacgcctgcatcataaagtggcggttgtgcgacaagcgattgaaattaatcggcctgatgccagagatagcattgatgtattggcaaaggttggtggttatgatttggtgggtatggcgggcgtaatgcttggtgctgcctctgtcgggctgccagtgattctggatggttttccttcttatgcggcggcgctggccgcttgtcgaattgcacccgatgtgcgtcattacctgatcccttcgcatttatcggcagagaaaggctcaattattgcgttgcaacacctgcaattagcgccttatttgcatttggacatgcgtttaggggaggggagtggcgctgcgttggctatgcatctggtggatgcggcttgtgcgatgtataacaatatggggctacttgctgaaagtaatattgtgttgccattttagttgtcaggataatttgataacccatattgattgctggcaaatatgaaactctcccgttctgttgagtgaaatctcgtatacggtgaattcgtatataccctatggatttcaagatgcatcgcggcggcaagggagcgaatgcagccaacaaagaggcaacttgaaggataacaggtatatcgtatttcctttcctttcctttacttcactgataaatttcaatatttaactgttcatggaaagtgttaagttaaatttgataggtaaaatcacctgattatatatgccaacaaataacagctataataaggaaaaaataaaatgtcatcgaaaattatatatataaaccctaatcaatcttttgaaatctttaagcacggaaatataatatttcccaatggctatcctgaggcaattataaaaaacaatggcccggcacccattagggtgataaattactgggctcctccgattggagattataatcaatataactatattgatgtttaccccggtgagacgaaaacgcttctcgcacctgttaacgctgtttatttctataaaattatagtcaccaatcttagtcctatttacaacacggaaattgaagtgacatcgcagttttggaattggtagttgaactttcatggagcatattttaagagtttcactatttaccaaactaagcaggaggcaggttttaacctgccatcctctattttagttgatactgaatttcgctctttttgatttttttattcttgaataataactttaagtatttcaggtaaatatatctcgtaatattttcttgccaatgacttccatcatacgtagttgttttgggtttcaaggttaatttaagtagaatatttacagtagttgaattctattcctaacacaaaatggttaacgaaatttttattgccatgagatttatcacattcttctaaaatagaatcaatacttatattatatttcttatcaatataatatatattcatgctttgaatattactgaaaaatggctttctatggcgaatataatctatttggaaattaagggtgataagcaaggtttgatatcacaaggatgttcaacggttgattctattggtaacacatgtcagcttggtcatgaagaccatatatttgtttatgaattgacttccaatataaccagaggtcaacatgttaaccatcagccggttgagataagaaagccaatagataaatcttctcctctgctgggattggctataacgaataaagaatcgctacaatgtattttttatttttatagaacatccactaaaggtggtttagagctctattataaaataaaactcactggtgcatatatctgtgcattgaatggcttttatccaaactcatctacgcataatgaatgtcagccacaggagagtttatctttgatgtataaatcaataacgtgggaacatattatgtccggcaccagtgcatatagcatatgggaagacaacgtttactgaggattttatgaaagggatatctcatctttcttatgatttaaataattacgcttcgtcattgaagcgtaaagcacacttggctgctagcttttttatagaagatagccaattgagaatgtcatatttaaaagaagttgatgactttgttaatataaaaacacgtgaatttaaaaatacatttgatgtaaatgaaaaaaagagattgatttatgcagtaaaagatgaatatgaaataacggaaaaagaatatcaggctttaaggcgtaaggattataccaaatatattgtaaccgatatatttgaagatcagggcgtagttaaatacgcaaaaataggcggtggggttgttgctggtattgctcaaacagctgctggtattgctgtaattaattcagggagaattgtaagatctaaaagggttcaattaatgggtgctgtgctagttgctcatggaggtagtaatttttatgaggctattagtccgatcctttatgagaatcaaaaaataggtttggttaggaaaggttatcgatatgcctctcatgctttaggttatggtgatgatgtagctgatgttgcttatagttcagttgatctcgtagcaagtttatatgggacttatggagtgctcaagcttaaaccggttaaatccaagaataatatatcaggaggctattctgtcaagccggggacagggaaattgttcagatatattaattcggatcttgccagaaaatggcagctaacaccaaagcctatgttaaccattcaagtattaagtagtggatataaagtcaaacttttgatagatgacataaataaacttcatgacgattgaaatttattttttattttaaaacgaatatagaaaattaacaattttgaacctgtaattaaattacagctaacggagaagctgtaataaataaaagcagagatcgcaaagaataagtaaattgaaaacattaatggcactccatatgccatatcactgaaaaacatacctaatatcataaataaataaattgtggttaaatatattaaaggtatggctatttcgtcagctataagtaatagatactgacaaaaacaatctgttttgctctggtatttatcataaatatcaggttcgtctttatataagataataaagtttcgctttatcttaagtaattcttttaagctgaatccactatttaatattaattttcttaagtcaattaggttcatttattcatgctcgattttatttggttttataattagttgtttttatcatgttttattggttaactcaaggatttaatttgtttttttattttaaaacgaatatagaaaattaacaattttgaacctgtgattaaattacagctaacggagaagctatagtaaataaaagcagaaatggcaaagaataagtaaataaatgacatcaatgaaatgctatatgttttttcgctgaaaaacatgcctgttattataaataaataaactggggttaaatatagtaatggtatggcgatttcttcagctataaatagtagataatgacaaaaacaatctgttttgctttgatatttattataaatgtgtggggcatctttatgcaggacaagaaagcttctctttatcttaagtaattcttttaaggtgaatccattatttaatattagctttcttaagtcaattaggttcatttattcatactcggttttatttggttttataattagttatttttatcatgttttattggttaattcaacgatttaatttgttttttattttaaaacgaatatagaatattgctaattttaatcctgtgacaggattacagctaacggaaagactataataaatcgagaacgagctaaaaaagagtaagtaaatgaatgacattaatgaaatactatattccttttcactgaaaagcatacctgatattataaataaacaaactgaggttaacattattaatggtgcagcaacttcttcagctataaatagtagataatgacaaaaacaatctgttttgctttgatatttatcataaatatcagggtcatccttgtgtagaataataaagtttctctttatcctaagcaattcttttagggtgaatccactatttaatattaattttcttaaatcaattaaattcatttctttaaactcatttttctaactctataaattgcttaccgtaaaatacttattctttataactgtttgaagttttcttttattttgagacgaatatagaaaataactaattttatgcatgtgaaaaaattataacgatagcggtgataaaaagatttatagcatatgcatattattgttaaaatgatataaatgatcgatattaatgataaataggatattgaattttcgtcatagaggaaaatctccattattatgcaacctacatacatgagagagaaaaacaacacgggatcgccggcatcttcagcaagcactattataacgttgtaaatgttatcgctttttgtataatactttattacatatcttctttcatcatcgtcaagatttttaaaggttctttgcagcataagaagttctttaaatgtgaatccactactgagggttaattttcttaatttttccaaatccatctattcaatctcataatattttgttgatataatgaattagtataacataattattatcttattatacccgtcatctttcaagttgcctctttgttggctgcactcactcaccccggtcacatagttctctatgctcccggggattcgttcccttgccgtcgcgatgcatcttgaaatccatagggtatatacctaataaatgctttctttagatctgtttttagaaaatttgttgtactcagtagtatggtactgccattgtaatagaaatgagagaaaaaaatgttatcagaatagataatgaggaaaaaacagtatctgattttggctattacatgattgaatgaaaaattatatacgataaatttgtttatcgtattccttttacttcactgacaaatttcaatatttaactgttcgtgggaagtgttaagttaaattttacaggtaaaactacctattatatatattactaaacaacagaaataataaggaaaaaaataatgtcattgaaaaaaactatctctatagctcctcttggaaccgttgagatttatagtaatagcgatattgtaataccaagtgttgccccaacggcaattataaaaaacaagagtatggtaccaattagggctatcaattactgggctggtttgattggagattatcagcagtatagtcatgttgatgtttatcctagcgaacttaaaatattcgtaggaccaagtgaccttttttaccgctataaagttgtagtctccaatcttagcaataccgaaaatgcagaaattgaatttgtaatggactctttgtggaaaaaatatggaatgccaacaaaaatggtatatatgaattctaacgagccatttgaattttatagtaagggtaatgcaatattccccactgatttctctgacgcaattataaaaaacaatagcgtggcatatattagggctgtaaatttttgggctggtccactagggaattataatatgtatagctatgttgatatttcccccggtaagactgaaatacttgcatcacctcctaatattgttaattactataaaattgtattcaccaacatgagtaactatgttcaaaatgtagaacttgaagttatatcgcatttattgtcgggctatgattaataaatcagggggcaggttctggcctgccatcctattttttatctttatattgatgattttcttaacgaggtaaaaggggtatatacccttccatcaacgactaagagcaatgccggaagcttgctgttccagcatgtttttagctaaatcgacaataattgccgcggcttcgattgggggcgtgccgccacgatgaatattagaaatacaagtgcggtcagcttcaaccgttttttctacagttggttggtaaacagcatagcaggaaagactttccgattgccctaatccggggcgttctccaatcaataagacaactaccttagctttgagtaactcgccaatttgatcttcgattttaacgcgaccatagcgtacaaaaaacggcgtaccgatgcacattcctgcttgttccaacccttttaacagaggtggcacaagatcttcgtagttggtggtaatggcatcagtagacaggccatcggagataacaacttgtacatcgggcgctgttttacactgtgtcagtaaagtttctaccgcattcgcactgagttttcgccctaaatccgggcgagtcagatagagatttttgtcgctgacttgagattgcacttctagcaatccttgtttctctatccattcagtcgggacctcttttaacaccgtatctttagaacgggagtgatcagcctgaaaacgcagtaatgcctgagtacgtgggcgtggaccactgcggccggtaccgactctcgccaccgtgctgcggcgtaattcctgtaagacttctatccggttcgggttttggacaccgatccactgtttggcttctaaggagcctaaatccggcatacagctttcaatttcgttagtgatttcaggggatgcatggggtttcagattagatacccgctcgcttacattcttttcaattgttttttggttcatgatgatttatctcagcaaagaatcagaaaaagaacgatgcatcgcccgcccgtgatgttaagcggccatttgccatcagccccatctgttccagccagcgttcaaactcgggtgatgggcgcagattgagcagatggcggatagtggcggtatcatggaaagccgatgtctggtagttgagcataatgtcatcaccgagcggcatgcccatgatgaaattacatcctgcggttgccagcaggatcatcaggttttcattctggttttgatcggaatctgcgtggttggtatagcagcagtcacatcccattgagacaccgctgagttttcccataaagtgatcttctaatccggcacggataatctggcgatcattgtagaggtattccggcccgatgaaaccgacaacggtattgaccagaaatgggtcatagtggcgtgctaaaccgtagtttcgtgcctccattgtcacttgatcagcgccaaagtgagcaccggcggagagagcagagccttgtccggtttcaagatagaggcagttatcgccagcaagacggcaatattccgcgccaacggcacgtgcttcatctaacatagccaattctacgccaaactcttttagccctttttcactaccgcaaatactttggaaaatcaaaccgcccggtgcaccacgcttaatggcttctatctgggtcgtgacatgagctaagacacagccctgtgttgggatggaaaatttgtcgattacctcatagagggtatctagtacacgggtgaggttttctacatcgtcggttaccgggttgacgccgataactgcatcacccacgccaaacgatagtccttcgtaaatttgggccaaaatgctttgtacatcgtcgcgggtatcgttaggttgcagccgggcgctgaatgttcccggcgtcccaatggtggtgttggcttttttgatcaccggcatttttttcgcgccatagatcagatccgcattggagctgatttttgccacggcggcaacgacttcggaactgattcctttacgcagaaaggcgatatcatccacgcgggtatcatcgctgagtatgtattcgcgtagttcaccaatgctccagttttttataccggcgtaggcaatttcgttaatgtcatcctgaataatgcgagtcacgcaatcctcttcataaggaatgatcggattcatgcgaatatccgcaatcgtcatttccgagaggacatgtttagccgctacgcgttgttgggaactttcggccgctaccccggctagcacatccccggaacgcaattcgttcgccattgccagcacctgtttgacatctttaaactgataggtcttaccaaaaagctgcgttttcaatttcatgtttacgctctctcaggaaggaaaagccagtgatttgatagtgacgggaaccacagtgccattaaatagtggcgtgccaatgtcgatataatccccggtgcgggtgatcacttcatcaataaccgccagcggccgttctcccatcagaggatgtaacagcatacccaatgccttaccaaagtcttggcctgcaacgatgagcagcgggtgagaagagggatagcgtgcggcaaagttctgtaaagcggtaatgcatgtctgcacggcggcataattcactggcagggcatcgggcagggccaatgcatatagatcctgctcagcatgcaggtccatttgtgtcagtgcttgttgccaggcttctgccagtgattcagtggcttctgtgtcgggatggacgacgggaatattgcgcaggggtagcgatagtgcatcaagccagatagtgctgccggataacgataatgtatgagcgccggcgccaatgacggtagcgcgcacggtttgttttggcatttgcagcggcagtttggcgaaatcattatcacgatggatagcttgtgccagcaatggccctaaatcgtgaaaacggaataggtcatgctccgatgcttcacgataacattctcctaccccgccggagagggtgactgcgtagagttcatcacaatttagttcatcacagtttggcagcggctcggtcatcaataattgttgagccagtggcgtaagttgtccggtaacgacttcccacagcaattgcgacatccgcatagcaatttgctgtaattgcgtggctgtcagatgttgaatatcggtattttcgccaaacagtgaatcaacgatgcgtactccgggcggatgtgcgcgtaaaacgttcccttgaggatcggtttccaataaacggccgccgacatttaagcaagcggaggcgataagtcgcccggcatcgaatagcgcgtagttggctgtgccgccgccgatgtcaatgttgagcactctggccattttctgctgtgaaagagcttgagcgccggagcccaaaccggcaatcattgattccagatgtggccctgctgttgcgacaacaaaatcccctaatttttgtgccagcgtcataatcgcagggcgtgcattgcatgttttcgcggtttcgccggtaatgataaccgcgccggaatcgacactttccggcgcgatgtttgcggcctgatattgtgcctggatcagactgaacagttcgtcttcacgcaattgtccggcgaagtctacgggggtaaataacactgggctttgccagatgatctcgcggcgaacaaactcgtagcgtggcacttgtgataccgctgcacggttcaccagtgacagacgcgaaaagatcacttgtgtggtggtggtgccgatgtcaataccgacactgaataactccttggcttccatcgctacgcctcttgtctgcaataaggcgtatgttggcatttttttttatcaatcagtattaaatatcggcaatttggttggaaaatcaactgtggtcacaaaaatattaggggtcataataaaaatggcgtagatacaagatgcagggcgaagttgctaagagaaacaagcagataaagtaacaatgcgtcagaaccgagggttatcgtcaatacattaataaaaatgaagaattattgatcttacaccagatcgtgttgctggctatcggttatatatcttccaacagactttcgttacagggtgaaaaatatgatgaatagcggaaaagtttggttggtcggtgccggtcccggcgatgcggcgctaattactgtcagaggattacactgtatccgtcaggctgaggcgctggtgtatgatcgattagtcagcccggacctgttatccgaagcacctgatgattgcaaaatgattaatgtcggcaaaacgccgaactatcacccagtgccgcaacagcaaattaatcagatcttggtagagtgtgcgcaacaagggttaaatgtcgtccggctaaaaggaggcgatccttatgtgtttgggcgtggtggtgaagaagcggaagctttagcactggcgaagatcccttttgaagtggtaccgggcatcagttcatccattggtggtctggcttgtgccgggatcccggtcacccatcgtgattatgcctcaggttttcatgttgttaccggccatctgcgtcaggaaaatgaatcacaggattgggcgacactggcaaagttggaaggtacgttggtgatcttaatgggaatgactcaactggcgagcatctgtgagcaactgatcgcaggcggtaaagcgccgacaacgccggcggcggttgtgatgtatgctagccatcagcaacagcaggttgccagcgcaaccctgctaacgttggctcagcaggtagccgctcagggattgagtgcaccagcattgattgtgattggtgatgtggtgcgtttgcgggaaacactggcttttagtcgggatcatctattgttgtcttctgttccatcactgatggcactctgattctctgtttaacatttggggataatatttgatgagcgaacatggcggtaatgtgctggaaatggcgctgaaaatcggtgttacagtcgaagagatgattgatttcagcgcaaatatcaatccgttaggaatgccggaatccttgaaaacggccattatcgaccaattgcaatgtgccgagtactatcctgatacagaatatcgccggttacatgcagcgttagcgcaggctcatcattgccctgtcgaaaacctgatggcgggtaatggtgcgactgaattgatttatgcggtggtgaattatcttaagccgcgccgagccatgttgttgataccgggatttgctgaatatcggcgcgccttgcagcgcgtggattgccagattgatgagtatgtgatgagtgaagcggatagctatcaacctgatgaacgcttgttgatggcattagaacgccatcggcctgactgtttgtttcttgcgacaccgaacaatccgacggggttgatgccagatgctgtgctattgcaggcaatatttgaacgttgccgtcagcataatattgcgttgattgttgatgaggcgtttatcgattttctcccggatattgctggatttattcctcagatagcgcattttcctcgtctttatattctacgttcactgacgaaattttttgctattccggggttgcgccttggttatctggtcagtagtgatgtaatggggattcgggcgatgaagcgctggcgggagccgtggaccattaatgctttcgcggcgttggcgggtgaaatggtgcttaatgataacgcttacattcaagcaacacaccgctggttagctgagcaacaacgttggctttatcaggcattagctgcattaccggcattacgtgtttggcctccctcggcaaattatatcttcctgcgttgcctgcgcccagaaatcgatcttcaacacgcattgctgaaacagagaatattgattcgccattgtgctaattatccgggcttggatgcggctcattatcgggtcgccattaaaggcgagcatgataatcgccgtctggtatcggcgttacgtcaggtattcggttatggctgaagcgcgttgtcctgcatcgtgtggtgaacttatccaagggtggattcttggtggtgagaaattgatctcttgtccggtgaattggttcagtgaagtgtctgttacagatggcgtgccgggaaaagatgaacgtccccgtatgcgccaagtgatgaaaactgttctggcgtattttggtttgtcggtggagatggcgcgaggtttacggatcgccttgacttctacgatcccgatggcaaaagggctggcaagtagtaccgctgatattgccgctacagcgctggcgacggcgcgttatttggggaaaacacttgatgaaacgacactggctagcttttgcgtacagcttgagcctacggatagcacgttgttcagtcggcttaccttgttcgatcatcaaacaggtaccacgcaaattgcttgtgactggcagccatctatagacattttgttattggaaagcccggaaatcgtgatcacagctgattatcaccgtttagatcgccatccggcattactggaaaatgcctccgtgctagagcgtgcttggaaactattttgtcaggctgtgactactcggaattactggcggttgggcgaagccacgacgctcagtgcgcaggccagtcaaaagttgttggtcaaaccggcgtttgacagtttgttggaattggtagaacggagtgggatctacgggttgaatgttgctcatagtggcagtgtcgtcggattattgtgcgatcgtcaccatcatgatgttgaatatctatgctggtggctgaaacagaggggcataattcgtttttatccccgtcagcacttgctgaccatgattccgggtggtgtgcgttaacgataggaggagatttatgttggattatttgccgatgttttgtcagatccgggataaaacctgtctgctagttggaggaggtcaggtagccgagcgtaaagcgcgtctgttattagatgctggcgcacatctattagttaacgcacgggaatttaccccgcaatttaaactatggggggataacggccaagtaacactcattcgcggtgagtttgagcctcactggcttgagcattgttggctggtgattgctgctactaatgatgcggcggtgaatagctatgtgtgtgattgtgcgacggagcgccgcattttttgtaatgtggtagatgagccacagcaagccagttttatcacaccgtcagtgattgatcgctcacccttggtgattgctatctcctccgggggaaacgcgccggtattggtcagattatggcgtgaaaaactcgaacggctgctgccgatgcatcttggtcgtctggccgcttacggtgggacacttcgccagcgggtaaaacgacattttcatcatttggcggcacgtcgtcacttttgggagcggtttttcactaatgagcgattaatgcaatcgttggtcagtcaagatcatcaacaagttgatcgggtggtagaaacattattctctgagtcatctcaagcgaatacaaacaaaacaaacagttgactaatatattggagctggacaaatgagtgaggagcgatataaacagagaaaacagcggcaaaaagagagatttatggcacaagttgcagccgctcaagaaaaccgggggattgtcattatctataccggtaatggcagagggagaacccccgcagcaatgggaacggttacacgagcgttgggtcatggattaaaggctggcgttatccaatttattcgcgatgaatggtcagccggtgagcgtgttttgttgcagcagcatggagtagaatttcagctaatatcaatgaacttgactggagaaatgcaaaatcgtgctaaggatattgctgcttgctctgaggtttggcaccacgcgctgcgcatgatgcgtgatcctgaattatcattggtcgtgctgagtgaattggtttgcgtgataaataacggttatctattgctagacgaaattatcaaggcattaagcgaacggccaattaatcagacggtaatcattaccggacaagattaccctactgaattaattgaattggctgatacggttagtgaaatgcgtccgggaaaatatgttttcacttaattatgcgttttccggtcaccacatcagatgaagagtgattcatgtttttatcttgtttaaccaatgcattaatttctctcatggtgatatttgatattgtgccagattgatgaaaacgctcagccattttctgcattttgatgagtcgattattattcattatatgttacctcgattaataaatcagatgatatacccgtcatctttcaagttgcctctttgttggctgcactctctcaccccggtcacatagttatctatgctcccggggattcgctcccttgccgccgcgatgcatcttgaaatccatagggtataagttgtcttcaagattactattattgatattaacaaattttttggctaatagattataaactttcaacagtttattgggaatatcttgagttagtgaattgttgtccatgaaatctgcgaaatcatcagtggtaaaaattttcattgagagtatttattattaaaattataattagccaaatgtgattatatttttgggtgttaaaagtatactggataattatttttcaaataatttaaggttaataataaagttttctcctatgtttacttggattaagtatataaaaaccaattaatattgaggtgattaattaattggttatgatgaactttattggatatatattccataaagcttgataatacatgaaataaattccatacaatatattccactatccaataattttaatttatttacaagttgggatttatatctaatattgtcgacggaatagatataacgttaatttaagttttgatatgtgaaacgagttcacgtaatccatatcatattttgtcgcacactgtattaagtttcaaacaacgcatggttatttaatttataaattaagaggtttaatatgtctattgaaaataccgatatagctgaacaaacaactggtaaagattcagttgtacttggacatgcagaagcgccggcaatacattctatcgcaattggtgcttcaccccgaaattctaaaaccatcagtgaagcggctattgccattgggcaaaatcaaattgcgggtaaacaaggtgatacgaaagtcatttggcctattgcgattggggctgattctgtatccaatggcttggcttctatcgctttgggacaaaaggtgacggcgagtgcggctcaggccgtggcgattggtcaacacgcttctgcaacagaaaaagggagcattgcattaggtgcagattctattgctaataaaccgaatgttgtttctgtaggaaaaaccggccatgaacgtaagattatacatgttgcggctggggagatttcaaatcacagtactgaggcggttaatggtcagcagttacatgctgaatcggcaaggattgatatattattagatgcaaagaataaggaattggaagagaaggttcaatctctggaaagtgatatagctaatcttactctgctggttcaaaatagtgtggatgatgttgcatcattgaagaaacgacttctcgatgcgttgaattattaatatctgttggttgttatttcatatattcttggctattaggctgagaatatatgataaatgatttagtagcagagtttttatttatcgattgcttatttacctccaatattgaatctcttaggctaataaaagccagcttggaaactggcctttcacgcatcggttaaaaagcagacttacagaaagcaaggtgttgacaagtagacaacgacactatgaacacttgatatgaaagatgtaacagatttcatgatgaattctctttattggtaaagtgtgatttgtttcacgaaaatctaaattgtggctgagattttaatcagaaaaacttcagagtcaagcagtttttaaaaattattttaaagattaaaataattttgtgtcgggtgttttaggtgatgaagtgagcgtatcttgcggggagaggataccaagcgatatgactgacaattgcttttaagattacaaatgcagttggcagttgttacatgagaggacaatggaacatgatagctaagcagtcgttatcggtttggcatcaatctagtgagacaaagccgtattgaaagggtttaaagatactcctctcatttttgatgttaattagtttaagccaccaaagtagaaataaagttatatgattttgacatattattgagaaggcgcagtctatttagactgcactttgatccaataaaaaatcgtgtaaaaaatagaaaatgtgtttacaacaatgttaaaagtacctctgtactataataaatttattttcatccattttaattgatgagttgtaataaaaatacttgtgattattgtttttatattatttatttaataaatctgaaaaagaggcaacttgaaagatagcgggtatataccgtggttttatttgtgctggagttataatgctaaaaaatttaatttggaatatgaaatataaaataagtaatgacaaagtgaaataattttagatgttgaatatgaatgctatgaatatattctcagttgaagtttgttggtttttttcttgccgtcaatgatataaaaataattattcttctaagttagaagaacattttattattatttttatgaattaaactatggctgctgtaaattatgagtgattactttaataataattcaatatattaattataatatttaatctaaggggtgtatatgagtactaaaaatgattttaaggctttttctattagtaacaatgctaatgtagtgagtcaagagaagtatgaaaaagatcagagtttgcaggcggggtttccaccagataatattacgagtaatctgctaaacaaagtattacgtcaatcgtcaacaatcgcatctgtcgtggctaattttattgcgacacaatctggcggtgatgttctggatgatggagatgtagctaaacttaccgagcaattaagtaaggctttaaaacaaaaaattacaacagaagttcctaatgcttcattaacacaaaaaggcattgttcagcttactaatgtactgggcgatagtgacacattagcggttacgcaaaagcttgctcaggaaatagtaaactcattgcgtgaaagtattaatgctaaggtatccaatacccgaaaaattaatggaaaattactgtctgaagatatcaccattacttctcaggatattttgggtgggcaggcgattagtttaggtgataaggcagatttaaatagctacaaaataccgggaatttatcatcaagaatatgatgctcatgccaaaaatggccttaattatcctgaatttcttgccggcgctcttgttgtattgaaatcggctgggacggttcaacgctattttgtctataatagtagtcgagtatatacacgtagtcagtttcatgataatccgtggacaccttggacgagagagtataatacgctgaataaaccgacggctgatgagattggcgcatatacaaaaatagaatctgattctcgatatattgcgggaattcgcagggtgaatggaaaatctttagctacggatgtcactattacttctcaggatattttgaatgggcaggcaattagtttaggtgataatgtaaatttggatcactgtaaaacaccagggatttattatcaggattataatgctcatgctaaaaatggcgtcaattaccctgaaccgctttcgggttcgcttattgtgttgaaagcggctggaattattcaacgttattttgtctataatagtagtcgtgtatatacacgtagccaattccatgataatgcttggacaccttgggctcaagaatataacacattgaataaacctgctgacagggttattagcgggtatacaaaagcagaagtcgataacctcgttaatgctaaaggaaataaaaatacagcgttgaaatcagtgaatggttggtggaagtgtggggatacaggggtaatttatcagtgggggattgtaaattgggctgcacatgatacaccagttaattttcctattcagtttcctaatgcttgtgtaaatgtttcgttaacattaagtgataaatctaacctggaatcatcatataatgttgttgcaagacaattgtctgtaacaggatttagttattgggcatacgagactgaaagctctgcattctggtttgcaataggatattgatatgtaatttgcaatgcaaaaatagatgtttttatttttgaatttcctctcaaaataatatgattcaatttgaggattgtatatgagtgccaaaaatgattttaaggctttttctattagtgataacgctaatgtagtaagccaagtaaagtatgaagaaaaccagagcttacagattggatttccaccagataatattccggttaatctgttaaataaggtattacgtcaatcgtcaacaatatcatctgtggtagctaattttatcgcgacacaatctggtaatgatattttggatgatggtaatatagctaaacttaccgatcaactaaatagggccttagagcaaaaaattgcagcagaagttccaaatgcctcattaacacgaaaaggtattgttcagcttaccgatgtagtgggtaatagtgatacattagcggttacgcaaaagttggttcaggaaataataaattcattacgtgaaagtattaataccagaataccaaatacccgaaaagttaatgggaaagtattaactgaggatattaatattacttctcaggatatccttgccgggcaggcgcatagtttaggtgacaatgccaatttggataattataaaataccggggatttatcaccaagagtataatgctcatgccaaaaatggtaataattatcctgagtcgttcgctggttcgttggttgtattgaaagcggccggggttattcaacgttattttgtctataacagcagtcgggtatatacacgtagtcaatttcatgaaagcccgtggacgccttggacgcaagaatataacacactgaatagacctactgctggagaagtgggagcatatgcaaaagcagaatctgatgctcgatatatcacaggactccgaaaaattaatggaaaagcgttagctgcggatatcaatattacttctcaagatatcttcgccgggcagtcgattaatttaggtgataacgcggatttaaatagttataaaatacctgggatttattatcaagagtataatgctcatgccaaaaatggcgcgaattaccctgagccgtttgcgggttcgcttattgtgttgaaagcagcaggcgttattcaacgttattttgtttataacagcagtcgggtatatacgcgtagccaattccacgatagtccgtggacgccttgggcgcaagaatataactcattgaataaaccttctgacaaggctgttggggagaatatggaagcagaatctgataatatttatgctgcaaccaaagaggaattaatacagcaagcagaacatgagaagtctcagttattgactaaagttaataatcttgttgctccactacaagatgctgttgatttaggcgttgcttccgaagcagaaaaagccgctctactggaatggaagaaatataggataatattgagcaaagttgatatttcattggctcctgatgttgagtggccggagcagccgaaataatgaaaaaatgatttgaataaacagagcattcatccaatagttttgttgatgttggggagaagatactgaaatattcagtctggaacttgaaatagaaaatttgcaataggaaattaaagagaggagataagagtaattttttgatattaaattgcctgtttcagccagttataaaaataattaacattctaaattgcgagaatatttaattattgcttttttgagctggattttaatctacatgaattaatatataccctatggatttcgagatgcttcgcgacggcaagggaacgaatccccgggagcatagataactatgtgaccggggtgagagagtgcagccaacaaaaaggcaacttgaaagataacgggtataaatcatttatataatgatccaatatgttaattataaaataatatctttgatctaagggggatatatgagcgtaaaaaatgattttaaagctttttctactagtaataattctaatgtggtaagccagcaactatatgaagagactccggaattatcgactggatttccaccatatagtgttcccactcatgtgttaaataaagtattgcgtcaaacgtcaataatggcatctgtcttggctaattttattgcggaacaatctggcgaggatattttggatgatggtgatatagctaaactcactgcacaattaagtaaagtcttttatgttggagctaagcggccgggtgatatctatttatctgcacatccggcgtcagatttagctaaaggagagtatattgcgaatggtgatgttcacctaattgattctgttgttggtagagcattaaataatttatctgatgcatataaggcagcatgggggattaaacagactggtgataaaatcaatctccctaatttgtttgttgatggacgagggatatttgtacgcgctggtttgcaacctggtgtgatgcaggaagatgcgattagaaatattacaggtaatctgggatggcaggggcatgggctttttactcgtaccagtggagtattttatggtgttaggagtacggcaacagttattgctgcgggaacgaaggttcatagtaatcatggatattcagcatatgctacttttgatgcatcgaaggtagtaccaacggcagacgaaaatcgcccgctaaatattagtatgataccggtaatttatttaggtgtataagataaggataaattattattttgacagtattaggttagtatctatttattggattatttgatgctaattaaggtagtaatccctcggtgaatgctttaagaatatagccagaatttaaatatggattttggctatatattaataatatgggaagtgataaggaaaaatcgctgttaacgggcctgaatagatagcctatttattcaggccattttgttggtgttataattagtatattgaaaggttatgttcgtgacttaaagataaaataattgaagggaaaagtaaagatatgataaataataatttctaatgttgaatataatggttttggggatgtttttgattacggtatatcgaattatttgttgatgtcaattatataaaaatagttactcattttagttataaaaatatttcattattatttttataaactagactattatcgatgtgagttgagagaaatcatctttagtgataattcaatctgtttattatgaaatcatgttatttaatttaaggagatgtatatgagtgccaaaaatgattttaaagcttttgctattagtgataaagctaatgtgcccagtcaacaagagtatgaagcatatgcaaggttgcctgttgggtttgaagacggacagtatattcctaatcacatgttaaataaggcattacgtcaagcatcaactatatcatctgctatagctgattttattgtgacagaatctggcactgatgttttggatgatggcaatgtaactaaaatctccgcacaattcaaaagcgtattagacaaaaaaattgccaagtgttgtaatcttaatgtgaatacggctaataaggttgtgaacggttggtggaaatgcggtgatactggaataattattcaatggggccaggcaaatggctgtggggcgataaatgattacagatacttcccgattccattccctaatgcttgtttccagatcgttgcaacatattctgagtttgaaaattctggcactggagttgctgctttacctatttctgcaagccaatttattgtaacatgtagaaatggtgcatctcagttagcaggtaattttgtaagatatttggcgataggatattaattatgtatttttatagtgcaaagacaaattcattctatcctatagaattggaacagaattatattgcttctggttcattgcccgatgatattattgaagttggtcttgatatttatcaagaatacgctgcgaataatgtaccggaaggaaaatatcgtatagcaggtcaaaatggtttaccggaatgggctgatattcctccaccaacaagagaagagttgcagcagtatattgaaagtaaaaaacaacaatttattgtagaggctagccagcaaatagcaccattacaagatgctgttgatttaaggattgcgaccaaagaagaggaggcggctctattggtatggaagaagtatagagtaatgctgaacaggattgatatttcactggctcccgatattgaatggccggaacaaccaaaataataaaagtggcctgaataaacaggccattcttataatggttttgttaacatgggttaacaaatttgacttgaaatcagcatataatattgttgtaagataattgcttataacgtgatttaattattaaatatgtcctaagtaaatctctacgttttggtttttaacagaatattgatatatgtttacagtggaaaaataaatgatttttattttcagttgttatcctaagccgacattccgcaccgcattcgtaatttgttgttttaattaagaattaataaatgaataaattttatacaaacgattttaaatcagtacattacagatatagctgcggaatgacagctaagaccacctcttggcgaggtggtcttttactcagtccattttgttggtgttataattaaaatactttaatgttatgttcgtaacttaaaaaaagaattgaaggtgaaatttaaagaaatgaaaaatattaatttatgaaattgaatataatgagttttggaatgttttgattataattcggcggctattgattgttgccaattatataaaaatagttaatctttttagttataaaaacatttcattgttgtttttatgaatagtctattattgatgtgaattatgagaaatcatctttagtgatagttcaatatgtttatgatgaaatcatgttatttaatttaaggaaatgtatatgagtgccaaaaatgattttaaagcttttgctattgttagcaatgctaatgttcccagtcaaccattctatgaagcatctacggatttgctgaaagggtttccagacaagcaggttattgataattacatattaaataaggcattacgtcaagcatcaactatatcatctgttgtagccgattttattgcgacagaatctaacagtgatgttttggatgatggtaatgtagcgaaacttactacgcaattaaataaagcattagaacaaaaaatcaaagtagaatctgataatcgatttattcggttaaatacgaatacaaaaacatctggttgtattttatctaagacagcaaatgtatttgacgatcaatctctgcgggatttgtcattgtcaggtttcttgcgtccaaatggttgggcggacttaggtggtttggcaattcatgtagctcaccctagtgcggggattcagcactcaagaggaatttcgtttgaatacggtagtacatctggaggtcaggaggggtttggaatacatacgtatgcatttgacaaagatggtaagtttaaaggtaaaaaaagaattttaacggaagatgatcgtaataaagcgatattatcagtaaatggatggtggagatgtggtgatactggaatgatttatcaatggggtaatgtacctattggtgataatcagggaaaaattgtgaacttgcctattttatttccaaatgagctcttatcgcttcatgtaacggctatttcatcagcaccaaataacaatactgatgtaacttctgcttatggaaagccattaaataagtctcagatacatatttctgtttcatcaaattacaataataatggtataagtggtgtttatttttttgttattggttattaaggagaagaaagaatgtattattatagtgccaaaacaaacggattttatccaatagaattggaacagaattatattgcttctggttcattgccagatgatgttattgaggttagtcttgatatttatcaagaatacgccgcgaataatgcaccggaaggaaaatatcgtatagcaggtcaaaatggtttaccggaatgggccgatatttcaccaccaacaaaagaagaattgcagcagtatgttgaaagtaaaaaacaacaatttattgtagagtctagccagcaaatagcaccattacaagatgctgttgatttagggattgcgactcaagaagaggaggcggctctgttggtatggaagaagtatagagtaatgctgaacagaattgatatttcacaggctcctgatattgaatggccggagcaaccaaaataatgacagtggcctgaataaacaggccattcttataatgataatggtttttgttaataatcggctattaacgtccgagttttatcctcaacaggagtcggattttttaatgtagttttatggtggttgtcatggttaatgaataccattagttttctgaggcgaggattgtaagttagaaaaaaatataggttgtaattttaactttaatgtatttaaaatgatgttgaaaaatcaccaataggagtagtgtatgaaaacactaataggttttttggcattaatactgtgtagtatgtcattcctatcattcggcgcgagctttgattgcgcaaaagccaccagtaaggctgaaaagttaatctgttcgacccctgcattatcccaagctgacgacaacctatatataaattaccttcaggccaaattggctacaggcaacaatgtagactttaaggcgctggtaaaacagaattgggaacttcgcgagaaatgcgtggtagttgaatgccttcaagattggtatatacccgtaatcattgaagatgcttgattttatccgaaatggagatcattatcctcgctatgaaaatatttattacatcagaacaaaaaatcaaacttgaacgtcttcacgacaccactcgtgatggtcaggtacgagacagaataaaagcgatccttctggcttctgaagggtggagttctgtgatgatagcccaggcattgcgactccatcagaccaccgttgaccgccatatcagtgattaccttaatcaaggtaaacttaaatctgataatggagggtctgatagtttgctttcccgagaacaaactgattttttaatcaatcacttatctcaacatcttttccatcacacccatgaaatcgtggcctatgttgctcagctctggaatattacctttagcattcccggcatgaataaatggctacaccgtcagggtttttcttataaaaaaccttgtggcgtccctcataaattcgacgcagaaaaacagcgacaatttattgaatattatgagaatcttaaagtcacagcgaaagacgaacccatcctttttcttgatgctgttcacccgactcaaggcaccaaactcagttatggctggatgcgaaaaggcgagaaaaaaaccgtcaaaacaacaggaagccggactcgcctgaatatattgggtgccctcaacctgaatgccattggtcgtacggtgttccaggaatatcagaccatcaacgactacaacatttgctgttttttcaatgaaataagaaagtcttatcctgactatcatcaaaaaattcaccttattgtggatggagcgggttacaacaaagctcatcttgtgaaggagtgggcttatgttagcaatattgagttacattaccttcctccctatagtccaaatttaaacccgatagaacgattatggaaggtcatgaatgaacaggttcgaaataaccgttatttcgcggataaacatgaatttcgagacaacgtcttcaaatttttcaccacaacgctaccggatatagcggactcgctgatgtctagaattaacgaccattttcaggtgctaaaaactgcatcttgaagtttcttgggtataaacggtcatctgaaatgtacaaaaaaattgctgcgattaaaacaacagagaactgctataaagaaagacaaaaaattacgcttgatggcaccttattaaggatcacctatcccggcccgccaaattatgaaagcgtggaaaacggggatagccctgaaacttattgggtgctgcaaccggataagacgataaaatgtgccaagggtgcaccagaatggggggatcgtagtctgatgcaactggtggttcaggaggaattttatacagtgtatcgaagccttatcggacaccgcgtgaaagtaaccggaaccattatgtacgcggttactggacatcaccacacaccgataatgcttgaaactcaacgaattgaagcggctaaatagtttggaagtaacaacgaggtgttttgctgaacaatattatttaataaagcccgcatgtgacttttattcagtctctttttttgccttaccatgtgggccattattaataatagtaagcagacacactgttatctaaaacgtggagctatcatcgattgggtaaaaagaattgagttggttatcaagataaactttaacaaggtttactcgaacataaaatcatagctgttgctaaagatgatgattcagagcgtgttgtgagcaagtttttttgactgaaaatatcaaaattcttgagtagcgaggtggccatatgaatgcattagctaaaattaaagctgaaagtaatttcactatattcaaattcggatctcatgaaatccgcgttatcaataaagatggtgagccgtggtttgttgctcacgatgtttgctctgctctagaaattcaaaatatcacgcaagctattgaaagattggatgatgatgagcggtctatgtttaatatagggcatcaggatgatattaatgttgtcagcgaatccggaatgtataccttagtacttcgttgtcgtgatgcaattaagcaaggctctattcctcaccgtttccgtaagtgggtcacaaatgaagttttgccatcaattaggaaagtagggaattatcactctcctaaaatcataactgatgaacacactctattacgtgatgctgtaaatatgcttgttggtaaacgtgggatgatgtgttcagaagcatacagtttcatccatcaacgttttaatatatctcatattgatcaactgccaatggataaaatcactgaagctatcgagtatgttcataagcttgtgcccgaagatgaatctattggtaaagccgagttaccagcactcgaaattaaacaatataaacaacaattcactgatgatgagctgtgtagtctttgctggttatggcgagatgctgtcgagatgattagttcaatatctgatgtttatcccattctgagagctgcggaacataggcttgaaggtaaatattattcaatgtcacatgaatatccacgaaacatgaacatagtccggcgagtattaaacagcttaagatttggaaatctaccgttctaaccctaagccagggatggattacattctgaacttgcttagtcaatattaaacgtattacactcatttctatacggtctgtatagatctagttgcccgatacagaggagaagagaaatgagattacgttgcatggcttatcgtcaagatgggatgtatgtagctgcctgtttggatctttctttggctgcacagggtgacaatatagatgaagcagtaaataaactcgaagcccagattgaagattacctcagtgaggtgaaatcagaacctcagtacgaaaaacagatgttaagccgaaaagcaccgctatctatgtggtttaaatattggcgaattgcctttcgaattttcatgaacagaaaagacagtggcctagctaaagtttttaatgaacagtgtgaacccgcttgatgtagggtggtgttatgttttttaagaaattaacgccgttgaaatacgccgaagtcattaaagggcttactgctcttggttttgagatgaaacctaaaagggggacttctcatgagcaatgggtcaagaaaactgagggcggttaatggctagtcactgtcgataaacaccatgcgccgttttccagagacttgataaaatcaatggcgaaacaagctggtatcagtaccaaagagtttcattcattatgcaagggcatggttagcgctgaacaagtgcacgctgaaaactcatcagaataagtaaatctaagttttatcctaccaatcctagctgcttaattgcggcttttttgtatcttaaagacgaggtcacaaatgaaacgctctcattgctgcaagacttggttgaccttaaaatggctaccgaagcagaaaaagccgctttgttggattggaaaaaatacagagtattactcacttgtgtagatattttacaagcgtctgatattaagtggccgcagatgcccaaatgaatgaagttgggcaagcggagttttacaccagctaaatcccagccataaaaaaaccaaccctaacaggttggtttttctggggaaatttggtcggcatgagaggatttgaacctccgacccccgacaccccatgacgacagcattatctagctaaaagccttgtgtgatgcgggtttggagggttttgactgtaaatacaaacagtgcagaatctgcaaaatctgcattatatgcatcaataagttaagtcgaatttttccacttatcagatagctatttctgcgtgtggaacctcgacccaatcgacatggttttgagtataaatttttgttgatttagcgtcactgtgtgccatccgagcttgtggatctataccctgttctttaaatatatgagcagccaacgcccgaatttcgtgaaatgttggcctttcatcaagtgggagacatgacgccacgccaactttatccctcaaggaagaaaatgccctacttaaataatcgggagcaatttgagtgggatgattaacttctttgcttattttagttggtaaacgttctggtactcgatgaacaacgtatgggcttgcgatattatcccggctggcatcgatgatagcttttatcgttgaaccaattgggatcgcaatgtgtgatgcttctttatgctggactttttgcctgtgaatataaagcataccatgaatgccgttttttggctccgtataccatacacagccgcaaacaccttccttcggtgatttgatgttgtatctgatacgggaaacttctaaccgtgcttgagtggtttgcaatgcaagatccattgctgttcgtaaccacggttcagcggcattacgtataagcatgaaatcatcaaatgaaagcctgcgacgtttctttttatcagtacgcttcattttcttgcgctcggctggattgtcgagcattaatgattcatccattgcgtagctgaatactttttttaagaaagagaccttcctattttggacgtttgctgacgcatcgttatgataatgtttgatataattattaacgtgttcaagtgatatatcacatgctagtgtatcagtaaaaaacgtcttcattcgttctatatcatttcgccaatccgcaagagtgttgtcagacggattttcatctttaataatacgggaaaaaaggttatcaatatgatgatgaaacggaagggattctccgtattttccacctgattctttaactagcgaactgacagatacagatgactccggcctcattatattgttatattctctcgctatggcaatagcgacagccttgtcgctaccaacgcacttcctttttccattaacgagggtcaatctgtactcattaacagatttatcgtaataaagaaaatcaggtaagtgcctaaattccttttttcttggtcttgatgccattttatgaatccctgattaattgactaacacaagaagaaatagaagactcaaccccccacctttctgatgaattaacccacactgagccatcaataatttttccctttaatttacctatctctatccaatgtttgatggttctgttgtctggaaccgagttttcttcaaactcacgttttccccatgcgctagctttcattaatttagcattgttaatcataattcgaccttaatcagcgggcttgttaatttcgtagtgtctaatttcccttaattttcttgctatatctcttgatatattctcaattttgttacttaactgctgtaatgtttctatgtcatcatgatttaaatcaagtattattattttattaactaactcatagagtgtataaaagtatgcaattgatattaattgctcttgctcctcattttcacctgtttttaatgtccgctttatatttaaatcgaattggcctgcactatgtgtaataacatatttacctaaatctattctcattttcatatttctttccttatatttctcacataataagacagcactgatttagcgctgaacttcatctgatgctcagacataattaatttaaacttgggtgtatatttatcgagtattgctgtgactgatttatcgtcgtatttgttaagagctgttagctcgcgtaagcattcccttgctattttgcgacgtccgttttcgtatatttggtcattcatctggattaaatttcaaatcaattattttcatttttaatcacatattaaatcagttaactcattatttaatagcctacatttttcggcgacatcaatgattttctgtactctttcaatgttagcttctgtaatgtcaaattcaatttcattgaatccatcctgatcagttatgcatattgaaaaccaattatttatcagtgaattattacttttaattgctgatattttaataaagaataacccacaatttaaacaagctattgtcattctgggtgaattatcaaaataccaatcatcaagcgtgtatttaaaatctttcattgagtaagttaacataatcaagcctcctctaattacactcatatttcaacgagagtttctttccagtcagttccatctaaagtaacaagagctacaatttcatattgagatgatggtaattcagagaaccagttgtcgttaatttgagatggccttttgttccatgccaatacaattcctttgctttctgttgctataaatttagtccagaatggaactgataattcgatgccgaagtagttaactttgatcggctttattaagctaattaatttcatgtgattttatttcctgtataaattcaatattattaattggggactcatttccccatgcatgccatccgtgaatttttcttcttgcaaataattcgatgcgtgggacatttccatatagttgttcaagtctgtttctgacctcccacggcttttctgaatgctctccgacacaagagaaaaccacttgcttcactgccgcactaatccgttcaattccatttccgcgaactgcgagcaatgcatcctctgtatttgctcgcgtgtagttacccatcccgatcaccgtttctttgtttaatatctccatgaaatcaaagaaatcttgaactccgtttttatctatccgatcaccagtcaatttatttaatttcacccacgtgaagagcttcattgttttaactttaaagccccacgcctcggccagtttaattgcttccattgcaaaattacccgtataccacattgcaagaactgagttgtcggcggctatagaatggatggggagtttagttaaatcgaagaaagatgttgtcttatagtgattattcgctgcaccgcgtgaagatgcattattatactgccacggagggtcggcataaataagttcatatttcatcaaactaaatctcacatagtgatttaagattgaactactttattttcaatgaaatttctgttgcaacttgatttattctatcacttatatcttgcagtgatttaatatcatcgcgacgaatttctaataaaattaatttcttaattaattgctccagtcgtggataatagccgattgtttgcaacctctctttaccgatgtttttacctcccttgtttattttaatctcattaagaatgaactgatgctcatctgatgtgatgacatatttatctaatcttatttccataattaatcactccaataagataatgattctttagcggcatcgtgaggatgaatgtatttccaatattcatcttttctagaatatgattcaatctcacatgctgcggcttcttttgcttctggtaaactagctccgcggtacacgagagtatttatcatgtatcgcttgaacattcgtttccagatgaaatagaagtgatggcatagatagtcattcatcgctttcatattcaatatctaattcattaataggaataaataacccctcgtcatcttcaagaccgagacaaccatagaagtccactatttcataattttttcctgcactgaatttatattctgtagtattgatatcattataacatttaacaacatctccgggactaattatcattgacttatctccggcgcggatggatgaataaattctgcccaagcaataacctcttcgtttttctccaatgaatcaatccaattgcaataatcaggatgcgaatattgtatagcccaacctacaaaatttatccagtcatattcatcgtctgatatcgcccagtcaggcaaatcgtcattccactgatattcatgttttcctgttggagttggtttattaacataaattaaagtagtaacataaaaatgatgtttaacagggtcacaaacaagttcgcatttatttgtttcttcgttaaaaagataataatcttttttaacactttttttaacataagcccaatattttttctcttctccaatattaatttttggttgatttgaaaaattccagtcaatattaagcattgactcaattttctctattacttggccgggcgaacctgaatcatcttccgctttaatacccgcagcattagctatcgcagcaagacccttacaagagtcataaaacatttctttatagctatcacgttctttacgaagaaatttcaatttgtcagcaatctcattcagaattaaataatcgtcacagcttgctactcttgctaattcgtgacatgcagatattaaagtttctgtatttttagtcatgataattacctctttttaataatcatattttcgcaaatttctttagctctataacaagtgtcaatatcgaaccagccgaagtgacatttcctaaagttaattcctagcttccgtgctagcaattgatatgcatccgtgcgttctaaattccatttctctcgcatttcttcaaactctcgtttgccactcatccgagctatccgtgtcgggtaatctgccagtgtgccgagtggaatatcagtgtatgggtgtagaccgacatatgctttacactcagtgcaaatatatagccacggccatttactgtggattttgccgaatactttttcatgatgggctattgttacgtggccgaagcaataatgacatctcacgggaattggtagcgggtctttaacccgctgaatggctcgcgtatctggattccagggcgttcttttcatataaaacccctctgtttaattaatataatttcctacatattgattatccatctcagacaataatttagttctcaactccgcaagaatctgtcgctcttcatgcgtactacatgaagtaaatgcagtggaatattcaacatgatgcttatttaagtcttcattaaacgagataaaaatttctaacttcacagccataaatcacctcacttaaactgattgatttttacatctttcgggattcccgataataaatacgctatgagtaaaatcgtcgagatagactttatttttactctctcttttttccttttttctctttttatctttatgtttttggcattcagtacagctaccattggatacatatcttagcgtgtgcccctgtgggcacggatcgccgttaaatttctcaccgtacatataatcatccttatttttatttaactcatcttcaagagacttaagataattatttttctcctcagcggcattatatgctgtaaatggattcttggttattttccctcctggagttaaccagccgctgtgaaatgtggaatatggacaataaaccctcccaacttggatatcatcatgattgtgtttcatttccattgatcgccaaatttgaagccgatttcatttaatgattcgtccattttttctatgaaatcgggaaccatatcattaaactgactcatatattcgttgtcacgctcaacaacaacgtaatgaatcccttcacgagtcatacgcgggtcataattagcaaagtaccattcatttttacctgtgacccacatcgaatattgaacttgagccatatattcagatttaatagcatcaaaaccacccaagcggaatttcataaatacagcagtagtaaaaggacatttaagttcaagcccaagtccgtcactacaaataccatctggtgagcatgcggttctgagcgattcatctttaaatagaattgaagtttccgttacatttacatcagctacaaattcaaaagttgctcttgctgattcttcgtaattttttccccacgctaatgtttttgcatttacttccggcgtactacctgtgcacacttcgcccagaagtgtatagaaatatgtcagcttcatgtctgtccattttgtaccactacgcggttttgatatcacttttccggcttccgatgccgttattactcccaatcttaaccgctgccaatcatgacttccctgttcgactgtgagcaaatcaacccctgttttgctgagaatgagttcattgctgatcatttatgatgcctttttccttaaaaaatcagatgctttaattgcctccgactctgttaattcggcgggtgataatatttgtcgtctgaatatctttgaacaaagtggaagtaaatcatcgtcccaagttttattcattgttgtaagtaagtttgttatactttcgattgtgctatctgctgcgggagttacgtcaatgtaagagttttgacctttgctaaaatcaattccttcacccgcctctgtgtttacatagtcaatggctttatctaatcgctccctgcgaggccaatacttagccgcctgcttgactacggtttttaaaatcatttgttcctcgtccgtgacccacggacacgatttcccttttgttttatatgctatccatgccgatgatctatctctgatatcaaatatagctgatgctctcattgtgtgagtaatgtaatcacagtcatccgttttgattactgtatacgcgccgacaatgtcccccctcgattgcgctgtgtcgaattcgttgtattcgtgaattggcgcagtatcaatagatgtgcgcttgaatatgtcattttttcgaacaacagcggattgacaccacttaatagcacccgattgttgagcgatgtgcatcaaacccatgtaactgatatcaagacacacgcttttgtttcgtggcactagataagccagcttttgcgcagggtttagactaatgccaattgctgcaatgttcattactgcgctacgcgctgaaaccggattatttaatgcagttgtggctaaaaaatcattatttgcgaatatctgcatagcaaattcagactcacgtttaaatactatgcccggctcactacaaatttgctcaaattcagtcttgagcgggttgatgatttcataaactttttgtactgctgtgctcatatatcctccatttttactttcattaagcttagttcatacaaaagagaattaacgagctctgcggcttcatcgttctccgtgagtaattcgccaaagagtttgttagtttcgattgaaaaaattccagcaagctcaggaagcttgttataaataatttcggcatccatgccttgttgctctaatataatttccctgtagtgctcatcttccaacctcttttcttcaatctcatcataaactgcatatgggttcatttcacaaagcctcgattttataacccttttgctcaaaatattcctttatttcattaaagcaagagtttgttgaattgagtacttcttctgagctcccttgtataataacacttccatttatctcgatttcatttctgttattaataagattcactttaaaagaatcacaataaatcttaaacataattacctcaggaaaattaaaattaacgttgtgaacagaactaaacaggcgggaaataacatagcgaagagccactctttaactatcttcatatgctaaccttagatattgcattgcaatattccatattatttggctatctatattacgtgcaattctagctttagactgagctaagctaaaaatatgtttgtttattttcataattaatagatgatttttaagtgagatgttttgccggacgctatagctttaatgcaattcattgcacattcttccgatattccagttttgattaactcttgcagagactcattattaatacgtttacgatgatcaatgtcagcccgacgccgcttttcctcatctttctgatgctgaatttcagccaaacgagcgtgctcatctgttgctgctttacgacgttctgcttcaattgcagcttgtttttcaagctcagcgcgttttagcgcctccagtttttcacgttctgcacgctctgccgctgcttttgcttcggcttcacgttgctctgcggcttcgatttcagccgaagctttgcgctcggcatcgatacgagcctgctccgctgcctgttgcttaatttcttcctcgtaagcaacacgctggcgttccagttcggcttttttctctgcaaaatctctatcaaatttttcattcattaacagagcaatttcatgatcgacttcaacttgttttgccagttccgccgctgccttacgtgccttctcttcgcgcttaatgtgctcctgctcagcttcccagtcagttaatggcttgcgaacttcatcgcgtagctcattgcatgcatcaacaaagcgcttaatttcttgctctgccggtctcacggcttctttgagtcgcttaagatattcgcgacccggtttttctattgctgttttgctacgtgaaacctgtgcagctaatgatgcgattctgtcacggcctttttttgttgttgtgtctggaacttcatttactgattctcgaattttatttaaaaatccgtcaagcccatttgagatataaagagccggcgcttgctctggttttatatcaataacaaccagttcatttttatctgacatatttcattacctctgttatctccatgatatatctccgtgccctccgctggcttcactgctccatatatattagaactcacccttgcttattttaattagtgcatcacaatgctgctgagcagcttcttttgtaagatgaataaaacctatttttaacagtgaacaatctatctcattgccactccagaaatgttcacaatgtctatctccacctcttgagtgtaggttaggataaaaataaccaactccataatctaattcataatcaacaggcttcggaaaactaacgttaccgactgtaataacttctggcttgcggcgatattttacgttttcataccatcccggattgttagtaaaacctatccactttccaccagtactataaggccaatacgcttcccacaactcccaaggcttatctgttctcaaagcatcttgtgcatactgcaacattaactcagcgtgcacgtgttttttattttctgacattgtttaatcctcattaagtgttattttaattacccagcgacaccctctacttttgccggaaaagtcaaataatagttaaattcagccccggattcttcaatacaggccgggtagtcacgattagttttatgatgaagttcatttatctctttagtctttgttaaatcataaacagataagtcattatctccaattgtataaaatccaagtctttccgacggacattcatctaaaattttttgcaatttattaagccagattttttcttcactgtttaatttactcattaatttttccgttaataattagcatccctgcccattagttaaaaattaatccattgccgcgcgttatttctatttctccacgcgagagaaacatacatctttcgcatttcagagccgcgacgataaattttagcttctgataaatagcgagattgttcagctttacactcagttgcaaatttcatctttgatttcatttttaatcctctaattcgtctttattgacgttcgctttcaatccaaaattcaacccactgcttagcgctatctattccccaaagattggcggcggcgtttttatttgcatgtgcggcagtggattcagattctgaaaaagagatatataagccattatcagtgaatatatcttgaacttcttgtgatgtgattgtgttcattgtttaatcctcataggtttaattgataattggcttccctgccgacatttccctattttcccggtgtggcgaaatattaattactatacggtaaaattactataggtgatattttatatattcttttatataatttcgggtcttttttgtaaaatctaactttatctgaaatagatttatttgaaatattattatgttttaaattagacatgaatattttgtcacacaatatatatatttctttatttttaatatgttccatgtgtaattcaaatgctattataagtcttcctttttgtcgctcattccttttttgtctataatcactgtaatgagatttaaattcatgtttttttattgatcgattatatgtattagtaattgattcaaatttaaattttttaaaaatatattctctgagatttttagatatcgagcacgttacatgctcataaaataaagtgggataaggcaaacaaataacatctatttctttttccattgattcaatatagtttatagcatatttttcaaaacgcaggatttcatcattagataaaccaaaactacctaaattatatttgtggaaaaatatttgagttctcatgacaatcacctttatttattaactcaccacagcccactataaatgagctggaattagccaattggcaataaaaaaccccgaattttcgaggtcatttagagaatgcttaccatttctttttgggatttcgctggtgcgcgtggttaactactttatgcattgcatcagctttttgatgaatttcggtttcatcacgataattaggattgggtaactctattgcttttagaattttgttatcacaaccagaaattatttcttttatctttttctcaagttctttttctttctgtttttctatggcaatagccattcgacgctgtttccttctggctttgcatctagctctggagtttttcccaggtttctctccagactttatgtatttaatttcaaccatatctttaccttgctctcactgtaatgtttttactacttttaacattaacagaataaagatgcacatttggtaatacgcaattgtctaaagagtcataaactttagtttctcttactgaaagagctttatcaactcgattcattgcagtgcgcttaattgtaagaagcggacgaactggcttaacttcttcatcaggattaatgccgtgagcattgttatatgcttcggttaatgcctgtctactgtcacgacgacgcttagcagcattgttatatgcgtagcatttcatagattttctcctgttgatttctggttacactgtttgtacagcgcagtcagaaaccgactggttgaaaatgtgcgcttttcagcgctgtctgttaaagagcgaaacttccttgttagttacttttcctaaatatcagccctctataagagagaagactggtatttaaggcccctcgcggggctatatgcattacttcttaaatcccatcatgcgtaaccagttgttcagatctttgcggcttttgaaaactgtagtgcctaatttcccgcctgccgcgcaagaccagtcaaaccacacttttacgtttgctgcatattgagtaactctgccgctgtagccgttctgtaccagatattgcttgcctgtaaatttatctacgtacattgttgcgttgttgtatgtgttcatcgtgactatcctctgttgttcgttgcgtctgtttctagcacttgcgaatcatcccgatattcgtgtgcctcgggcggctacttcgtgggctttccttgcctgttcgctgtgtgcctttgatggaatgaataatacaagaaacattgtatgcctgtaaacaagaaagtttgttagttttgtagttatgtttgtattttgttgttttttatgagaattaaaattaaaaaaattttctaagtgggtgaattttgattggattttgagaggagggcacaaaaaaccacccgaaggtggctagttgtgagatggtgtaataggttggagagattattttttaaggtatagattaagtaaaaacatgatgatgggcatggcaattgagaacaccagtatacttagaaaccaaactttagtgccgtctattcgtttgtctacagtgctgattttttcagataacgataattcaacagatttaactttattacttaatgataattcagtagcttgaatcttccccagcaacgaaggctcgatttctgctagctttttagtggttgcagatatatcttttttagcgtccctgaaatctaatttaatctcgtctatagattttttgatatgctcaacatcggactcaagccttgctacacgggcctccaacatatctccacctccaccgccgccagtcttaaatggcaaatcgccttttattggaatcacattatcttgtttagtcattactatctttctccatgatagcaggatatttttgttttacccaatcaagaacttgtgatgtatctatcatcattacattcccacattttttacaaataattgaaatgtaataactatccgtatttttgtgatatatgctttctgctttaaatacattagcatacggcccgatacccatactacaagatacagcacctgtcatcccaacttgaggaacagtaaaatgtacgctatcacaaagactacaatgagggataactccttttgaatcaaaatactcactcaatatttcagcggtaatgaattcaaaattctcatacattgaagacattaattctcctgcaactaaatataagatattgataataaataaatttagccagattgttcaccttagctaatttcgtcgtcatcaatgtaacgcgtattttttataatagccgatacataatgaatcattattacattattcttagggattgttattggtcgatgatcgctgtttatacttgaaaactgataatcaccatttcgtgttatgttcataatttttatcatgttatgaccattatttgttctaacaaaaacttcatcaccgggatgcaccggagtgtttggttcaataacaacaaattcaccagactgtatgcggggccacatgctatctcccttaacttttaatccatatgcatcatgatcagtactacaaatgcgtaaccatccagcatggaattcaaccatgtctacggcaccgtcaataccgagaacagcttctccaattactctaactaatccgtttttaggctttccggcgtattctatttcttcttttttatcttccgtaccgtaaagtagataacttacagaacattgtaaggcgacagcaagctcagggagaaaacgcggtctttttgttttccccttttctagttgttctattgactgttgttttgttccgatcaaatcagccagctcagtttgagttaagcccatctcaattcgtctagtttttactcgctctgcgatcgtcatgtattcattacctcatttacacccccaccttaattctcacaagaaaacctgtatttgacaaacaatctaatttgtattttaatacaagaaattttgtcaaggaggtagtatggaaacattatcagagcgactcaaacggaaacgttcagagatgaacatgacacaatctgatttggcaggaagggtagggatgacgcagcaatctatacaattgatagaagctggtatcactaaacgtcctcgtttcatatttgagatcgctaatgtattgaagtgtgatccatcttggctgttatatggaaatccaaactaattcgtataacaacaagaccgctctttaacatctcagcaccgaaaggtgcattcctcactaagcggggagcgtagcccaattttagggctattaactttattttatttaaggaaatttaacagatgaatatcgcaatggaacgcaaaactaaagaaatcgaatcacgaataagaaagggaattgtcattaccgggcctaagcatgttgcaaatgcggttggcgtgcatcagtcgcaaataagcaggtggcaaacagaacagaccggctttgtcgctaaggccgccaagttgctggctgcaatcggttttgatgcaaatgtacaggaagtagttattcatggagaagaaacagcacagatagctaaagcgttgcaagagatgctatctcacttaagagaaagcgccccgtctgttacagcagatgaggctaatcaaatataagtcaataggggagctctcatttcccctaacatagcgaggtgattatggacagtttcgactatcacgtcaatgtcttgatgccggcgaatttctttcgtgatgatgaaaaatggattcgagaaatgctgttgcagctcgatccgtccactcgcggaaaaatcacggtgcgttattcagaagtgtatgaagcggcttgggatgaagagccggtatcgtaccggaaagataacatcgcacggcgtcatgcaaatatccggttaagagaatttgtcaggaaatatgctgctttcagccaggggtatgtaacaacccctactgagctgctgaaaacaggcactagccagcaaaaccagcccataccggagccgcttaaacaccgtggagggttcttttctggtaagtgctgaaagtcgaggtttgcacaaggccaaaacccggaaaacaaggtcaaggtcaacggcggatcgagtcacagaatctgacatatagaatcatagaagggacgacttaaaaatatgtttaaaatcaataggttaaaaatgcgtttttcccacagtatgggacaatttgtcccacagtatgggaaagtctttaaaaacagtgggttataagtaatttggcgggtgaagtgatgactaagcagtcaaaaatacacgatgttgaaattatacccaatcatgacactaaaggccatatattcattcaggcatacgacaaaggtattgattttattactaaatgtgcacaagagagagataacgcaacaataattttgtatttaaaaatgatcaaggacatggacaaagagacaggggcgctgatggtcgatgtatcaacgctcatatcacaaaccggcttgtcaaaaagtgcggtgtacagatcgataaaaaccctgaaagagtcagggatgatacgcagcaggtacagcaaagtttacgagataaacccggatgggttctggaaaggcaagcgggagttacgagataccgcgttgttttttgctgaatcaaaccgggcaagaaatgtgaaatacagattgaaccctgccagcgctgctacagattcattcactgttcccgctacgtttgaagaggaaacatagcgaaatcatcaataaaaatcgattcggaaactttggcgagcgaccccgaaccgactttcaaaggattcaatatgttaaatataacaccgaaggttaagcaggtcaccgcgcttaacatgcttcgtcatgactggaaaaaacatcgaacgtttttattatcggccagtgtaggctttggaaaaacagcaatagcggcgtttattgctgacggatttgtcagtcatggtatgagagtgatgttcgtagccccgtacacagtacttctcgatcagactgcgacccggttcgttgaatacggactgccagcagatcaaatcagctacgtttggcgaaatcatccactacatgacccagatcgactaattcaaattgcttcggctgacacgcttattcgtcgtgagtttccagacaacatcgacttactgatcattgatgaagcccacatgaagcgccgtaagttactggaaattatcagagatagcgacattcgagttgttggcttatcaggaacgccatttgcgacgtggatgggtaaatattacgagaagttgattaagccaacgacgatgaaagaactcattagcattggggatctgagcaaatatgagttctatgcgcccgacaggcccgatttgaccggcgtgaaaacaacaagtttagcggcttttggtaatgactataacgaggagcaactagcccagatcatgggcgattcaacgctggtgggcaatatcgtcaggaactggctggagaacggcgaggaccggccaacaatctgcttttgtgtgaatgttaagcacgctaactatgtcacgatggagtttaacaagtctggtattaacaccgaagtgatgacagcagaaaccccacatgatgagcggcagttgatcattaacaggtttgaacagggtgcgacgaaaatcatcgtcaatgtcggtgtacttgttgccgggtttgatagtgacgtgcgctgtatcatttatgcccggcctacaaaatcagaaatcagatgggtgcaatgccttgggcgagggttgagaacagcgaagggcaaagataaatgcttgatattcgatcacagtggcagcgtccatcttctcggcttccctgatgaaattgagtatgacaagttgccatccaaaaatgatggcatgaaatcttcatcaagttttagcgagaaagtcaaacaagagaaaatcccgaaagaatgccatggctgtcattacatgaaaccggctggcgtctatgtttgcccgaaatgcggtttcaagccgcttgctggtgagaacgttgatgttgatgagtctcgcgggctgaaaaaattagggaagaacgagcgaatttacagcaaggaagagaaacaaagctggtggtcacaaattaaatattatcagcgtgaacgggaaaatcaggggaaacccatttccgatggctggtgcgctcatacatacaagaaaaagttcggtgtctggccgcacggcttaagcgatcacttaattgaaatctcaccggaagtttacaacttcattcgttctaaacaaatcgcgtgggcaaagatgcaggagaaacagaaaaatgcgaacagtggaagcagtgagagggcggtggcctgaaatttttgaatactacgatttacccaatgttacaggaaagaaacattatgcaggagagtgtccggcatgtaagcgaaaaggaaaataccgatgcgatgacaaggacggtaccggatcgtggatatgtagttgcggtgccggtgatgggtggaagctgctagaactaacccaaggaaaagatttcaagacattagcaagagaaattgattcactaataggaaacagttacaactacaaacgaggtcatgataagcagcaacagccagaaactcaaacaatccgtgtaaaagtcatcagtaaattttcaacactacccccgctaaacgataccgccgctcaacactacttgttcaatcgcggcatatttgaattaccgtccggccatattcgtttcaatacggaagaaaaaacgccatttgggaataagcaggctatctggtcaattgctacggatgataaaggggcaggctgttatctccatagaacggtactagacggagagaaaaaagcggattttgacggtaataagcggatgctgaaattgcaggaagataactatctgaactttgctaattccattgctatccgcatgtttccagtctcttcaactttggggatagcagaagggatagaaacagcattgtcatgcaaacagatatacggctgcaacacctggtcaactctgaatgccggatttttacggaagttccgcgctcccaagggagtgaaacacttaattattttcgcagacagggacagtaacgggacagggcttgctgcggcgtttgagtgtggtaataaaaatattctgagtaacaatgatgtggaacttgtcagcattcgttggcccgaagccggggatttcaacgatatgctgatcaatggtgccaaagtatttcaagagcagttacagagatgaaggatttttgatatgaaggaaattaagccatgcccgttttgcggtagcaaagatgttggagtatttcggcaatatgaagatgactgtccgtatcgttcatcaattgtcagatgcttcaattgtgatgcacaaacagcccagtttattaatgatgatatccgtcgacagcatgaaatggcaatcaaagcctggaataagagagtaaataacgatgagtgaagaaagaacatttctaccatgtaaatgtggcggtaaagctatcaattgctgggtgctgcgtgattataacgatgaaagtaaaggcaggtggcattatcacaaatgccgtcgctgtcaaaatgaaagccaatcatatccaacgctagaagaatcagagatcgcatggaataagaaagtaaataatgggggataaatggaagctgatttttgttttcacgaatcaaataaatcacaagcttgggaaatattaaaagaaacacttgaaactaaacagccgcaccgaattattattaagccgtggaaagatactcgctcaattccacaaaataacacttttcatatgtggtgcggtgaaataagtcgttatttaaataaaaataacgctaaattgacgccggaggatgttaaggaagcacttaaacatacatttttgggttatgaggtcatagaagctattgatctcactacgcagcttacagagcgcatcaggactctgagaaagacgtcaaaattagatacgggtgaaatgttctatttcatgacgcaagttgagaaatgggcttttgatattggctgtttagtgaccatcccaaataactcacaatatatgaaattaaaacaggagcaagatagataatgaatgactggatactctatttctatgcgtttgctggcgttgtagcgacatttgtttgcgggcttatatggctgtcagcgtcggcaaggctattttatctttatgcgctgtggcagcttaagcagggtaaaagagcattgcgattaggcagagaaatgaagagagaagcaaaacagcttatagagtctaattttctcgcggctgcggctgcttttgagaagaaaagaaaggaataaataatgggtggttaaatgtcccagcaaacatcacagagtcagaagttaaaacgtttgattacgttcatgagctattgaaatcaagacgggacagacggagaaatagaaatgaaaaataaatatagtgaattgtcagattttgaaattaataaattagtattgattcaggaatctaaagaaagccttgcagaaattatcaatattcgacagcgtaatcatgtgtttcgtatatttcatcgtcaagtaatagctgatgttaaatttaaagatgaatctgatttttcggaaattggaccttttgatttttgtaataatccgtctgatgcatggaatattattgttaagaataaaataagcttagtctatgtaaatgatttttggtcagcacgtcagtatcataatgcatgcattgaagttaacgataagaatccattaaaggccgcaatgattgtatttctgatgatgagtaagggagcgacatcagtatgaatgtatataatttaaaattgccgtggccgccatcaaataacacttactggcgacatagcaggggccgacatttcatctcatcaaaaggaattgatgacatgcgtatcatccgcagtgaaagagtggctggtggttctcttaatattcagatatgggagataggagatgacaatcttcactgatatatccacagcaatagaagaagccagatatcttcattcaagaacaagaaaaaatcatgttgttctgcaatgtgaacatgctcgattgagagttactcaggatcggatagtcaggggcaaaaaatacacagtcatgttctcaaccaaatatgacaaatatcattcagttttattagaggtgggaaaatgaaccttgaatcactaccgaagtatttttcacccaaagggatcatgtttagtgactctccatctgcaactgctactgactcattctcaattaccgatgttatggcctcgctagggttggcgtccgcaaaagcgaggcttggcattgagctgtttttggcgaaacaggggatcaacagtattgatgaagccgtggagagcctttatcaatatgcaatgactcaggttcataagcatagtgctattaataagcttgatgaggatgttaagcaaaatgttctgcaattactcgcaaattatgcatttcaggattatgcgagaagtgcagccagtaagaaagtgtgtccagattgcgatggtggatttattacagttcgtaaattcacaacaaagtatggaagtagtgaaggaatgctggctaaggcattaaacatgaaacccaagcgttttattacctcaatccgagaagtagaggaaagatgcagggtgctttgcaagacctgcaaagggaaaggctctgtgagtcattcttgtcgctgtaatggacgtgggcaagttttggatgaaaagcagaccaagttacaaggtgtgccgatttacaaagcatgcctaaaatgctccgggcgtggatattcaagactgaaatttacagaagtctttgaagcaataaagccattaactgggatatctaaaacaacttgctatgacaaatatcaaccgttgtttgagcagttagtaagtgaatgctttaaagaagaggaacaagctgattgcgttttatcaaaattaacaaaaagagaatttatttctttttaattgttattttgtgggaaattaatattgacgatttcggaaaaatagcctatcgttattccaacgatgggtaattgcacttcgttgaaaccaaaagaatcccaagcctcgctattccgcgaggtttttttcatatatagggctgcgcatggcgcggctttttttgtattaactgagtgagaatgtatgagcagagaagacctgctatatcagatttactattcatattgcttagagaagatgctaggcgttattactgataaaattaattggacatcttctttcctgctgatactacttggttcaacaatcgctattatcggggattactatacggtatttgcagggttgttaatcactgccattgcgacaatgaaaatcatgttttcattcgaagtgacatcagaacgcgccaataagcaatcagcacgctatttgatgctctacaacacttcacatctgatcatctccgatgaagagttgttaaacaggcttgtgaatattcaggaggatgacaatagaccgtgggcctcactagcgtatccggcaatgttacaggccagtcaggttttaggcaggccaacggacattcaattaacatggtatgaaaagctgatggcttttctggctgattcagtgcctgtacgctaacgtttaaacagcaggagaaataggatggaaaacaaagaaaattcaacagtaatctttgcaggaaaagaggtagaacaagagcatctatatcatttgctcgaagttatcgcgcccgcagtctgtgaagtcgccattcaccatgctaaaaacggtgaagacaccgagatagtgactaaacatgcgaaagcaacagccgaagctattgtttccgcattgacttttactaagagctaagggctttccacgtccttatggagtcgtctttcaatttttgctcaagatcatcaatctgtaatagctcgttaaactccgcttcaagttttctgagttcaagcaaatattgagcgggtgaaagttttttgtcagaacggcgtaaatattcaaatgccagtgtctgcgcatctgtcataacagattcctctttggttgtagggactaaagatgataccacgcgccgggcgtgaaatacccggcaacacttcaagggctgcgatctgacgcggcctttttcttttcacacccgtaatcgcggggacttaatccccagcgggggtggaaatatgaagatgaaaaataatcctgatttatgggctgaattaatagacggcttaaaacattcgtggccgcaagtatctggcacggcagccgcaatattaatttgttggggacgtctgatttatgacggagtggaatgtaaaaacaaatgggctgaatgcctgttatgtggagttctgtcatgggcgatatccagcggtattgaggcgttcggtatttcctccgccgtatctccgatgatcggcggtgctgtgggatttatcggtgttgataaaatcagagaaatggctatccgtgccattaacaaacgcattggtgatgacaaatgactagaggtattcgaaataataaccctggcaacattgactataacggattcaataactggctcggtcaactacctcttgatccaaagattgaaccccggttctgccggtttgagtcacctgagtatggtatccgggcgctgttcaagctactgcaaaactatcaacgtaagcataatctgaatacagtcagagagattatcaatcgttacgcaccgccacatgagaacaatacggaaagctacattcagtttgcggctaagaaggtgggtgtctctgcggatgatcggatatctacccaagacaagataatcctgttcgctttagctgaaggtattatcaagatggagaacgccaatcagcaaccctattcaccggagacgttcgaacgggcgtttgagatgctatgaggagttgagtgatgagcattattcagattctggttccggtaatttattttgtcggtgttattgctgcatttattatttttatattgatagaaaaacgagtcaatgatccggaggagtttggggtcattttgtttatgtcattcatatggccgctactgattattcttatgccaattgtttttggattcttttttttaaacgagatatacaatcaattcgttggcagacggtcatgaaatttaacgctagttactacacgatactcgcattaatcgttatctcactgacagcgtattactatcactctgagttacagagagagcagcgagtgacaaagcagcagcaagaagacattcagcagctcactgacactatcaactatcagaacgctcacatcacgatgttgaacgagcttgatgtgaagcatacaaaggaacttgctaatgccaaatctgaaattgatgttctgcgcaatgatgttgccgctggtcatcgccggttgcgcatcgcggccacctgtaatcaaggcgaagccggttcctcctcccgcttggatgatgcagccagcccacgacttaacccagcagctgaacaagattatttcgatctccgaaaaatgattgttgaaaacgagcagcaaacaaaagctttacaagattacattagagccgagtgtcagtaacagcctctgtagacatatctctacggttgctaaagcgtgggcgagtaaatacagctcagttaagtcgttcccaaagtgacggtcttggagaaatcaacggtttaagtcaacaatagggatttcctctatggttgccaattaatgaagacaagtaactaattcagagcattctactgacagagtgctctgttgttcatcaccttgtttttaattcataatctgggtgggaatcagcaagaagaagcaataattcatactctccagacgaaagagagcgattagttttaccttccgcctctttctgctgccagctaacaagcgcataagaaaatcttttggctgcttgtgattgggtcatgccagaagctatgcgagcgcttctgacatcttgcggggatggtttaccgatgaacttatcagtcatcgttccagtcaccatagcttttttcaccagagtaatattttttaatttcatcgtagcgtgatttctcaagttcacccgattttacaagcgaccacagcgaattaagtgccgaagtgctaccgcgcatagcatcatttactgcttcacgaaagcgcgcctcgtcggcttctttaacgcgtcgggcaaattcagctctttcttctttgcttgcagtatgaaaatcaaatttaacatcatcggcatggacgccacgctttgctatccagtcaaaaaagtcttttctggcaaagaattcaggcactatgccgtagttatctgtttttacatcagtcattttcaatctcctgtttagtgatgtatacaatatacattcaattgaatgtaatagcaagtaaaaagtacaataatcgccaaaaaattagtcattttataaaattctacaaaaggtgctcataaagtgcctttgacagagttttgtataagtatttggtgcgggtggtctcacgatagtacgggattatatttcagcatgtagcataaagttctgattacagctgtttcctagatggaagtgattcaaactgcttctgtttgatgatgtaatatacaaaatactcggctagggtagctcccgaaaagcggatttcgtcaccgcctgctgagcactatttcatgacgattaacgagacgaggttaatatgaagccaattgaatatcttgaaagcatttctctttatgattctgttgcgcgtgatgcattaaatgcaattaagaccggcgcattcacagaagaacaagtaatagctgagttcatgaaagtaaaagccttacaaaataatgctctattggaactgcttgagtggaaaagccttaaagaggccaaaccttttcaagcaacaaagggtaagggaataccaggcactgttagaatttcatatacagcaacagatgagcacggcaatgaaactttgcagaaagaacaccacatgcttcttactgacgtatataggtgccgttttatcgtgtttttagaagaattaaagaaaagtgcaaaagagttttatgaaacagtcatggagggggatgagtgggatcgaaaagatacaagcgaaaagagtgcagagtgtttaattgtgaacggaaagcaccacggtaagcgacgcactttaacttcaagagctgaaagatatctggttgtaagcgatgatgtgtttccgtgtgttgatgttgatgaaatccctgtgcatttttgggtaaatgaagcggacggtaaaatttacatgattgcaacagcagaagaattaaactcgtctgagattagtttagcgatttcggaaacagatccgccgcttaagccgatatattaaattacaggtcgcccagtgcggccttttttatttaagggaaagagatgggacaacaaacaaatcaggttggttgccctagcaagctgaatgatgagctaatcgctaaggcaagggattatctgtacggcggttatgaatcagttggtgatgtcgttcctagtgtagccggattagcttgttacttggctattgcacgttcaacagcatatgaatatgggaagcagtccagcgagttttcggacatcttagaaggcataggggccatgcaggaaaacaagcttataaacaaggggctgactggagattttaattctacgattgccaagatgatgttaacaaaacacggctattcagataaacaagaaatcgatcaccggtcccctgatggttctatgtctccaaaaccaactattatcaggctcgttggagtcgagccagggcaatgacggtagcagttgacctgccgattcccgcaaaactcgtacctgtatttacaaaagaaaatgttcgttaccgaggtgcacacggaggcaggggcagcgctaaaactcggacatttgcaatgatgagtgcggttagggcttatcaagctgctgaatctggtacaagtggggttattttatgcgctcgcgagtttatgaactctctcgaagaatcatcaatggaggaagtgaagcaggcgatccgttccattccttggcttgatgactatttcgaaattggcgaaaaatatatccgcacaaagaataggctagtcaactatgtgttctgtggcttaagacataacttagacagcatcaaatcaaaagcgcgtattcttctggcgtggattgatgaagctgaatctgtatcagagacagcttggaaaaagttacgaccgacagtacgtgagtctggttctgaaatatgggtgacatggaacccggaaaaggacggaagcgcaacggataagcgacttagaaagaaaccaccgaaaagctcaatcattgttgagatgaactacagtgataatccgtggttccctgatgtgctggaggaggaacggcaggaagacttggaaagtctcgatcactcagattatgcgtggatttgggagggcgcttatcttgagaactcagagaagcaagtattagcgaacaaatacaagattgaatcgttccctgatgatctgtggatgcaagccgaccgtctattgttcggcgctgacttcggtttcgcccgagaccccagcacgctacttcgcatgttcattttagataactgcctgtatatcgaccgtgaggcttacagtgttggggtggaactcgatcacatgcccgcgttttatgaccaagtgcccgagtctcgtaagtggcccatcaaagccgattctgccagaccggaaaccatcagttatcttaagcgtcaaggcttcaatatatcagctgcaaagaaatggcaaggcagtgtagaagacgggatcactttcttacgtggtttcaagaaaattatcattcatccacgctgtaaagagaccgcaaaagaagcccggctctactcatacaaagtggatcgtatcaccggcgaggtgcttcccattattgaggacgcacataaccattgctgggatgcggccaggtatgggttagatggatacataaaaggcagaacaactgtttgggacatcatgtaatgacgaaaaaaacgatgattggccgtcttactgatggccttcacagtatgctgacatctctcggtgagcgggtgtcggcaataaaatatgcgagcaataataaggcagatgtgcctgataaagagttgctcgcaatgtataaaagatcatgggtggtcaagaaatacatagataagacggctgatgatatgttgaagctaccccgcgaattatccggtgatattgatagctctctggttcagcgcatcaaagacacagaaacagcactagccgtctataagatatttcatgacgcgctaacttgggcttcattgttgggagattcattgattgttgcaataactgattgcgctgatgagatgattagtgaaccgctaaatctacagtcagaagacatcattaagtttttggtactaagaaaagaggaatacacgccctctgataatgttatctcggatatcgcatcaccacattttggacatccgcagacttaccagatcagcattggcaaccaacaactcaagtttcattattcgcgttgccatcgtacaaagctgggtaagcacagcattaaagatataacgaagtacggaacatctgacattcaagcgccatatgacgctatcaaaatattcgatgcggcaattgtcagtactggggacacgatccaggaggcaaatgttgatgtcatatttttgccgggtttaaataatcaaattgatgcgggacaagagacgcaagttgtcgaatatgctcgtgtgatgaagcaaacaaaatcgtcaacgggcttaatgctaatggacgccggtgatagcacgatgcagagccgctatgagcaaaaaacagctcaattctcaggactgtctgacgttattacaaagatggctaatgtcttagctggcgcacttgaccggccaataaatattttgttcggccagtcagccagcggctttaactctggtgaagaagataacaagtcgtattacgaaacaatcaacgggttacaagaaactcggttgcggcccatgcaagactttgttgatcaattcattctcgacaaactagccgcgagcatcgacacaatcagctatgaatatccgtcaatagacagcattaacgaagctgacgaagcaacacggtttactcagtatgcaacggggttcacttctttagtccaatctggcgttgttacggaagatattgcactgcgcgaaatgcaagcacggggcgtgctgacgactgtgactaatgaggaaatcgaagctatggcgggggcaaataatggacagtggtatcagcctgaaacagatgctggaacgcaagcagggacgtttgaaggctcgcaaccggctaatgcgtccgccaacgcctagcaaacgaaccgaagtttggtatcgcgacaggctcattgagtttatcaggatgatgcaagatgttgtgatagatgacttgcaaaaaccaatattaaacgacgcacccaacaccccgccactttcaatcacttcaagactttcacgagcaatacaaaaactggcgaatatgtctattgctgatatggcaaagcgtttgtcattcggcatggtcaagcgtgcaaatgatcaaaacaaagatcaaacacagaaaacctataaatcagcgttcggtattgatttgacggggatgctcggtgatgaggttgtgaaaaaacagattgatgatgctgtgaaagagaatatcgatttaatcaagtcaatacagactgattttatcaatgatatcggctctaaagtgttcacgaatctgtttgatggcgggcgtcatgaaaaccttgtttctctcattcgtgagcgcggccaggtgacggaaagccgagcgaagcttattgctcgtgaccagacggcaaaactgaattcggcactgacagaaacccgccagaaagcgctcggcattgatttatacgattggggtggtgcgggtgatgagcgagagcgtgacagtcatttcgtattgaacaatatgacatgcaaatactcagaccctaccgtttattcagacgatggagggaagacctggaagaaacgcaaaagcattggggcatttgaggggaagcccggtgacgattatcaatgccggtgcgtcgctcttccgaaaatatcttgggattaattcatggcatggaaaaaaacaccgcaggggtatgttgtcacatctgcaacgattacccgcgccggtcccgtcgaatattacgggcatgaagttaagttaactggcgctgatgcaaacagaaaaatcactattcaccgaaccatcgaagaactttcaaaacccgaaactcttaaatcatttgaaggattacccgtcacgctaacgcatccgctcagcggtgaggtcaatgctgacgagtggaaagataaagcaattggacacatacagaacgtacgcatagaaggcgattacgttgtttgtgatgtgtatctgaaagatgccaaggcgattcaattacttgaagaaaaaggcattagagagctttcagtcggttatgaacccactgagatagtcgagaaaaacggtgaattacatcaaatcaatatcctcggcaatcacgttgccgttgtagcggaagggcgcgtcggcgctgattgtagactaaacgataaaaaaggtagaccaatgaagaaactctcattgaaagatgtcattgcgttgcttaagggtaagcgcgctaacgatgccgaggggcaaccactgaccgaggaagagctgatcggcatgattgccgcattagagaaaaccttgcaagaactggaaggtaatgcaacaccagaggccactgcaaaagcccaagaagttgtggcgcaactggaagagcttaaagctcagcttgagcagtcaaaaggggctggaacaccgccacccaatgatgctgatcctgatccggctggtggcagtgatgacaaagacgcccgtatcgctgcattggaagctgaaaacgaacaactcaaagcagagaaccaggcacttaaggaagaactggaaaaattgaaaggcgaaagcgacacaagcacaacattgaatgacgccaaagcacgtttccctaaggttcaatttaacgatgcgaaatgtgcgcgtgatgtgcgcatgctcgcactgttaagtactggggcattcaatgattcacaagtgaaagccatgtcggatgatgaaattcgggcagcttatgctgcggctagtgcgctaaataaaccacgtagcaacatcggggcggcattgctgaacgattcagcgaaagcgaagaaaacagcttctcagcgtttagggggtaaataattatggcctttggatttacagattgggacgccgaaaccggcacgatcaaacccggctctatcaaacgggcttcaagctcaaacgataaagtgtggggggaagaaaaccgcactgaaatagcgctgccctacggtactttcgtcgcggtaaacccagagggtggggtgaaacctatcacttctgcaagcgacgttatccacggcattgtcgttcgtgacatttacggtgacgcagctccgcataataaacaagtcaatgtaggacatttctctcatggtgactgtgtaggagcgctggcggttgaaaaagatacattcactcgtggggataaagtttatatcgttgcaacgggtaaggatgtgggaaaagtgactagcacagcaaaaggcaatattgatctaggctattgggctgaagaagttagcgcgggtaatcactgtgtagctatcactcttggttatatccacacccaaaaagtaggagagtaataaaatggctatggaacccgcatacttcgaagaagtattacaggaagcgctgacagagcgtgaccagcagttgcaggaaaaggaactgcccgaaattaatatcggtgaagcgttgccggtaacagaggggttagatttttcccttgagtacgtcgatttcggtgtaactgatgtgcttggctctctgaaagacggcattattggcaacaaaacgaactcactgaaaaccattgatagtgatattgaatggcacaaagcgccggtcgggcagtggggcaaatcagcaacttggacacagcaggagctggagaaaattgcgcgcttgaatattaacttacaaacaaaaaagcaagatgatttgtatgcaaacgcaacggcaacaattcagtacgctggttatgttggtcacgagggcgtaaaagggcaagaagggctgctaactggatctaaagttcagttaattgcagaagtaaccggcaaatcaatcaaagacatgtcagcagaagaattcattaacatggttcttaatgcttataacgtcgcttgggccaaatcgggttatcgcattcagccaacccacgttgcaatcgatgcatctgattttatgttggcaatgcagaagttcgacactaacagcgtgattgtgggtgtcgatttgctgcctgtttctgcaatggatcgtattatggcggcactgcgtaaagcatcgaacaatgattcattcagcattacttttgtgaaagtcccctctaactttgctaaaaacattgttaaagggaaaactcgtctggctatttatacttacagtgaggattacatcgaaatgaaggtgcacatgcccgagttgctggcagtgcgtcagcgcgacttgctcacttttgagtgtggctatcgttccgcattcggtggtgcaatgtggaaacagccaaaatctgctgtatatgtagattataaaagctcataaccacagggggtagcatggattttctcatccgttaccctgaatttgccaaaattgacgaaaatcgcatagagatagccttgcaagatgctgcaaatcagatgagcagcaaagtgtggggtaaactctacgagcaggggcgacaggctcttgctgctcacctcctctatgtctctggcgcattaacccgcagcggtaacagcaacgggaaacctgttcagacggcgacaagcaagtcggctggtggattatccattggctactctgcgcctgatgcgggtttcggggctaaccatgatggttatgcggccagcagttacgggcaggagtatttgcgcctgcgtaaacttgtctctcgacatatgctggtggtgcgatgattaagaattctggcaattttaagggggcagggcttaaggcgcttgaggcccgtataagggctttaagtaaaaagaaagtggttgtcggtgtgcctgcgtcgaaaaattcagatcaggacggtacaagcattgtgacgattgccgtcgctcatgagtttggtgcagaaataaaggttccggcgagggcggtaacagtttatcgcaagatgaataaagatggttcctttgctggaaaaggtaagtttgttaaagcaacgaagtctaactttgccagtacccatactgtacctgctcacaccatcaatattccagaacgctcatttctgcgttctacgtttaatgaaaacaaagacaagtatgccaataaattagtgaaaggtatcaagtctgagttgaaaaatgacggtgacccgcagcaagcgctagaaaaactgggggagatggtcgccagagatgtcaaaaggaaaattcaggcaggcattgatcccccattaagccaggcaactatcaagaggaagaaatcaagtaagccgctcattgataccgggcagcttgtccaatccattacttatgaggttcgcgatgattgatgattttgttaatgaaatctttgacgatgatttctttcggcaagagctggagttcaaaacatcggacggtcaaagccgggtgcttgtttgtatcgttcagccagccggagcggaagatctgcaaattctgccagaaggggatcgttataacccgactgtcagagtgatgacgcaagagtcggtagagaataaagagcttttcgtctggaatggctatcgctggcgcatcatcagcaacgcaagatggaatgactatggatactacgactctctcgcaactcgatacgaaggcagtcagacggacgatagcggcggttttgaaattacctgaatctcaggtgcttgatgctgacggtgagactgatgtgtctgatatgcagtcgtttatcacggtcaatcgggttacatcggaattaatgggtgaagaatataaattcaatgctaagaaagaaattgaaattatcactgtcacccgcgaaaccatcgtttctattaatgccttcggcaaaaatgcttatcttattatcgaaaaactcgccagtgttctaagcacaagttacgcgcaaactctttttaagcgtcttggtgctggcatagtccgaaaatcccaggtccgtaatcttcccactgctattgctggtggcaaagagcagcgggcacaaattgatttaactctctctcatatccaccgaattgaaacgtcagtaaaccaggcgaagacggtcgatattactgtttatgaggattagcaatgagcttatctattaaagaggtggtcaatgctcagatcatgccgcaggctatggcggcacaacgccgtgatttgagtatgatagctatttttacgccagagattggcacgtcgttcgctgatgcggatacgcgctatattattgtgtcaagcgcacaagacgtggcaaatctattcggtaccaaatcggaagcctacaaaacagcacaagcgcttttctctgtgcgtccaacgcctaaacgcgctcttatcgctcggtgggcgaaagagaaacaagaaattccggccacggccaatgctctgaaagggtctacgatctcagcaggcattaacgcattcaaagccattactgatggctcaatgatgctgaatgtcggtggtaaaaacgttttgctgtctggcctgaatttcagtaaagcaattgatttttctgatgtggcgagtgttctgcaagcggcattacccaaagacagcaatcttcaagctatttgggatactgtcggccaccgggtaattgtccaggcgcaaactgccggtgcttatcctgctacaaaattaggttatgtcacggaaccgggcgcaggtacttacgttggcaaaatgctgaaactggaagacgggcaagcaacgattgttgtcggcaaagccgctatcacagtcgaaaaagaattgccctctgaagctctgcataaattgcagaacgtttatcaaaactggtacggcgtctatttcgctgatgctattgctgatgaacagttagatgatattcacacctgggttgcatccgctgacatgaaagtctctgcttacaccgctctgcgtgatgaacaaatcgagtggaacaacgacaatatcatcaaaaagctgtatgacaaaaacagtggccgcttaatgtctcagtacaacaagactggcgatgatcatgccgcagtagcgttactggctattgcattgtctacaaactggaacgcgcaaaattcagctaagaccgtcaagtttaagcagcaaacaaccgttcgttctgataaccggattacgcaatcagaggcagaaaaatgcaagcggctgggtatcaacttctataccgactatgacggtgtatcgatgctggcagagggcacgatgatcggcggccaattcattgatgagattgttggcctggatgcattcattgatgcgtgtcagaaacaggcattcaccacattacaagccaatccaacaaaaatcccccaaacagacaaaggtcagtcaatgctgatcggtgccttgactgttattggtaatgagtttgtgaggaatggtttcctggctggtggtgtctggtggggtaatgatgtgggtgaattgacatatggcaatcgcttagatgcgggtttttatttctactctgacagctacgatttgcaatccattgctgacagagaagcgcgtaaagccatgccgattatgtgcgcaatcaaattggcgggtgctattcattccgttgatatatcaatccaattcaatcgttaaggtataagtatgtacaatcatgcaaactcgattctgacgatatcaggctatgagatatcgggatacgaaaatgcggccgatgcgcttaattttgcccctgttggtgatgacggggatatgacttacggagtggatggggatggtgtttatgtggcttcgtgtaataaagggttaattattacaataaagcttttgcaacattgcgaatctaatgagtatttgaatgacttacgcaatactcagatcaatatcccgaaagcgtataccccggcctatatttattataaagacgtcattaacggtgatgaaattattgccgatcgttgtttcttcaccacgccccccacggttacccgcggtaccgcccataacacaatgacgtggacactgaaatcaacccggtcaacaatgaaactcaaaaagggagtttataactgatgattattgacaatataaattacgaacaccgtttatctaatttcatcgaagccaaaaatcacgccttaaaactggttggcctgttaaagggttgcattaaattggcgggtgataaggttgatatcgatgtcggcgccatcgtttcaaatgttggttcacaggaaatgcagggcattgaacaatttattttgaaatatgtcacggtgattggtgcggacggcaatactgttttactacagaagccagacacgtttaatcagcatttcaatacttaccgatctcattatttccaactaatcattgacggattgaaatttcactttgcggattttttgcccggtggggtcgcctctgcggtaaatatgccgaacttggcggctctgaatctacagtaagtagtgatgttgactggatggtgtggacgccgatcatgagaaacatgtgtactttgcatgaactccgcaccatttattcactctctgatgtcatggatatgcatgaagccatagccgaaacgctattgtctgagaagagggcaaacgatggaaatcgacgaactactcgttagcgtcggcgtagacacgtcacaagcggcgaaaatcaaagatgtcattgtcgctctcggtgctgcggcagtgcagatcgcgaatgaggccaatggggttaataaaatcctggggggtgttggcgaagagtcagttaaaagcactgagcaggccgctcaaaaagccgaagaggccggggcgtcaatcagtaaattaaaattgctggctgtcggggttgtcgcggctgtcagtgttgcgaccacaaaagtgcttggctttattaatagttctatctccggtgccaaggatttagcgaaagaaaaagggctgctttataagatatccgacagagagctaaagcaggctgatgagtacgaagcgtcaatgaaaaagatggggctctctatcgactcggttaagacaaagatagcgctcaatctcgttccatctatgaccaaggccgttaatggtttcaatgcctggatcgcttcaaacaaagagctcatcactgacgggctgacaaagattatcaaagtgggtggcaaagttgttcaggttattgtcaactcagtccgtgcgataaacaaaattgtcacatcgactattggctggaaagccgcgattatgcttatcgttggtgctctggcaattcttaagcgttccatgctaatggcgttcattgccaatccggtgacttgggtgattgctgcgatagctggcctgcttctcttgcttgatgatctgatggtctatttagatggcggcgagtcattatttggcgcgttctggggacctgctgttaaatgggttaaagatgtcatcaagtgggggaaagacttttacgctaagtacaaggatatcattgataatttagtctcaatctggagcaagtcatttaaagcaattttgtctatcttcagcggagttttccaatatatctggaacgtcctcaaactatttgtaggtctatttaccggcgatatggatcttgttagtgaggcatgggccgggatgaccgccgcactgatgaaaatatggaatgggctgattgcctatctcaaagccttttttgctttcttcggtgtgatgtgggggattgcgggaaaactggccgccaacgcatgggatttgatgaagaaactggcaggcaaagcttttgattggataaaaggcaaggctaaaggttttgtaagtagtctaggttctatattcaggaaagtctggggctacatcaccgcgccgtttaagagggcatttaaatgggtgcagggactgtttggcgtgagtgaaaaagatgctgatagatatatcgataatatcggtaaagcgtttgatgctgtgtttgctttcatcaaaagtccatttgagaacgcgtttaagcttgtcaagtcactgatcgatatcgccactaatgacaacctgactttcaccgaaaaaatcgaagaaattttctctgctgtctggggctacattacagaaccatttaagacggcatttaagttcgtgctcggcttattcggggtgaatgaaagtgaggccgataagtatgtatcaaatatcggtaaaacttttgatggagttatagaggccatcaaagccccgtttaaaaaggcttttgactgggttgtggaatattacgataagaccgttgggaaggttataggggctataaaagatttcttcactggaaacacaaaagcagaagaggcgacatttggttttagtgatgatgaccttaagaatattcaatcttctgttatagctggttcaggtgattttattggtggagctatcgctaatactaccaataccaccaacagttcatcacaaacaacgacaaatcatggtgatgtaaatatgaatgtatctataacatctccgtcacctgaaaaggctgctcaatattctgtaaatgagcttaataaagcattgaaaattgctggttacaatacaaaaggacagttttataacggcgctggtggttagtttgctttctcttgcagctcttaagtgatttaattagcaacgatcttaactgttgtaagagaaggtttatgaaaagtttaatgttaccggttgtgttggctatctttttagttggatgtggagaaaaagatctgacaattgatgcttcaagctctaaggctttaaagtcttctacgcaagaaatttatcgctctctcgataaggatgatgcagcaaaattcaaacaggctgtcctcaatgtcggtttggctgctagcatagtaacaaataacgaggaagataagataaaggcaatcaacaagatgataggcggcaagactgccaagcagatcatcgaaatggacgagaagaagtaaacagccccgcgaggggcttattttttattatctaactgatttttcttatctttcatctcttcgatagattcagccagggcaatgattttatccatcaattcatgactgagggaaaccgttggttgagtctctggagcctttctatctaaacagtcctgtatcatttggactatctcagaattcattgaacgaccattttctttggctctttcggcaacggcatcccgcatgccatcaggtagtcgaagcatgaatttatcttgcgctgatacgggtttattagtcatctgcattaatcgtttagttgaaacagaaaaaggatactagcatattgacatcatgtaaatgcgtgtcataatgctatcatgtcattgtgacattattaataaggggacaagataatatgataagcctagataacagaaaaaagagcgcacaaatgcaactgagaacaacggagttcatgaaggagcaaatttgcaaattggcagataaagagggaatttctaagaatgcagttctgaatcaggctttggcttggtatatggatgaaagggcaaaaaatgcagcacaataaaagcgaagccccagttgcgcgaacaactagggcctctgagtgtcatttacctagcgtgataaacgactcagccattgtaacgaatggcgaatcaattttccagagtactaaaacggaaaaccagcagtttgccgctgctggtatccaagttgatataccaccggagagatatatgaagtcaattatcaaacattttgagtttaagtcaagcaatgaccaattagtaaccgtttcagggttgaaatataagggtaagcctgtgtttttcgctgtggagttagccgagggcttgggatacacgaacccatctaaggcactgaaagaccactgtaagtctttgattaaacttaattataacgattcgttagaattgggtttaggtgacaacccccgtggtgtcattcttgctgggcagtcagacatgttcagattggtaatgcgtagtaatttaccttctgctgagcgttttcaggattgggtgtgtgaagccgttcttccatctatcatggagacaggcagttactcaatcaagcaaagccagtctggtttgcctgagtatagaaaagccagaacgttgaagatgtcggttgatgcgatcactaacctgtttgagcttatgcccaatttgagtaatgaggcaaaacagtgtgcagcagctaacattgttaacccgatagttggttttgaagctgttccccttcccgcgctggaagagaaatattacacagccggtgaggtagggaagatgctggatttgtcagctaacaaaatcgggcggattgctaatgatcacaatctgaaaactgagcagcatgggaagttcttccttgataagtccgcttactctgataagcaggttgaagccttccgctacaatgagaacggcataaaagctcttcggcatttgatccacggtgttgaagtagcttaaggatttaaggccacggacggctcactgtaaataaattcagtagcgtgatgtaatattatggatatatatattttgctttggtatatttttggcgggcgcttgagactatctgtctctggcgtgctggagcggatagaagaaagccccacacgactataaatcgaagtgaggccagttcttatgctttgcaacataagattagcctcttacacgccgaaaggcaaggagacgctaaccatgaaacagcaaaaagcgatatttatcgccatcgttatttgtattgccgctttagcggctgtgctggtcacgaggaaagacctctgtgaggttcgcatccgaagcggccaaacggaggttgctgttttcatggattacgaacccaggtaagagcaacggcggggagcaatccccgccatctcttgttgttgagcatggctctcaagcgccctatcaccaactcttaattgctatctcatcattttattcatttttaagccgcttaattgcggttttttttcgttgtagagaaaagtatggacataatcagcgacttcttaacaactcaaagcgcttctattgtcactcgttcaattggcgagtttcagttagatgctgttactgttgaaagccactcatctacactcagattgacggaaaaccctatcgagtccggggcgtccatagcagatcacgcggttcttgaaccgaaagagattacagtaacgggcgtcatggttggctatgaaccgccgcggctagtcagtgacctcatgggctttgactcatcagcaatagatagctttccattgccgatggaaattagagctatgacaaaacagagtgaagccctggtaagtcgctatatctctactgtagatgctgttgttgaatcaacaagccgctctatggctccgttcctaccagattatcagggattagctgatgattcatcacagacgcttgatcgtgttggtaaagcatataacgacttgctcaacttacagaaaaaaggtgaaacaatcacagttcagacgggtatcaagctctatgagaacatgatgattgtcagcattggggttacacaaacgagtgatggttcagcagaattttctcttacgttgcgtgagatattcattgttgaaactcagaaagcaaaagggctgaatgtgaaaaagtcgcctaaaaaaaagcagatgggcaagactcagccgaaagaaacatcaaaatctgctcttaaggggatattttcatgatgtacgaaatcccagtatcaaccgaagaaatacaagagcaatcattcagtctatttaatatgaatcttagatttactttgcatttcaatcgtatatctaacgactggcagtttgatttgctcaatacaaacacagatcagtacattgctcagatgtatggacttacagtcaatagcccggcattgataacgaagaacttaccgtttgtgatcgtgatgagtgatagttccggttttggcctgaattctattagacgttctgagttgggtaacagactgaaaatttattttgtcgataaagaggtatggcatgaggcaattcggacgacaaattaaattaactatcggcaacacaaaagaatcaatagaaatcactaatctcagagttactttcgaagtatccaagacaatcacaagcgaacccaacccggccacaattcgggtctataacctcaatcaatcacatcgaaatctgattaccagtaaaacctataataaggcatcactagctgttggttatgatgagcttagagtgatttataccggtgatattatcgaagcaattacggttcatgatgatctggatttcattattgagctgacatgcggggatggctacgaggcttacacaggcgcacttgtgaacaaaacgctaaaagctggggcaactgatgctgatattctgtcagttgccacaaagtcaatgaaagttgataaaggtgtggttgatttaccaaaagatcggcagttaccgcgcggcaaggtactaactggcaatgcacgcgacatcatgcacaagatagcccgtaacaacggtgccaattggtccgtgcaagacggcaacatgattgtgttaccaaagaacaaagtattgactgacaacgagggcttcgttttatctcaggaaactgggatgatcggcagtcctgagaaaacggatgatggcctacaaatcacttgcctttgcaatcctgcattgcgtatcggcagcctggttcggattaagtcaattattcctgagtataacggtgactataaaatcactgaattagagcatgcgggcgattttatgtctgacgattggcatacgctgataacgtgcaccggtggaaaatatcagaaggtgaataatgaacaaaaatccaactctacttgatgtactcgataaaaaagcagaaaacgagcgtttggatattcacacagcattacccgcccgcgttgtttcattcaacggccacacagcaacaatcgaactcatgatcactcagacactaagtaacggtgaagttattgaactaccgcctttagcagatgttcccgttcaatttatgcgcgctggtggattttgttttacagttccggtgaaagcgggtgatgaagggctagctatcttctcagagcggtgtattgatggctggtatgcaacgggcaataaatccgctccccttgatgcacggcttcatgactattccgatgcattttttatccccggagtttgcagccagccgaagaaaatacctgatttctttcctggtggcgcgtctatgcagactgacgacggttcaacatttattcgcatgactaatggaaagatcactatcaagggagatattgaacacctgggtaatagcaaacaaacaggaaatcacgagcagtccggcaattggaaccagatcagtggtaacagcgaatctaatgggactgtcagcgctgcaaaagttgtcggcgggggcattgacctgcaaacccacgtacacggcggtgtgcaatcaggtggaagcaatacggggaaaccacaatgagggtgagacgcttagacaataatcatgactggacgttcggagataaccgcagtgattacgctacaaaatcagatgccattgctcagtgtgtgcaaacccggctcatgtctcttcgtaacgactggtttcttaatcccgatcatggagtgagatggtttgactatttgcggaaaaatccaaatttgatgcaaatggaatcagaattgaaaactacagttctgaagaccgatggggtgatagaaattaccgattttgacattcaaattgatagagatagccgaaaatcactggtaactgtcacttatattgatatttacggcaatagaaatgaggtcaatgcagatgctcaaaattactaagacaggaatagttattgaccaacttgcagatattcaccagcgccttgcagatggatttaagcgtatctacggcgaagatattaacttagaggctgatacaccggacggtcagatgatagggttgttttcgcaagaactagccaacattaaccaagtgattgcttttgtcgggcagatgctagatccctatcaatccactggcgcgtggttagaacaacgggcaatgtatgcgggaataatacgccgtggtgcagaatacagctatcttgatgatgtagtgataactggtaatgctggggtaaacgtaccgaaagacacagttttgactgatgataaccgtgttaagtgggtaatgcttgacgatgtcacacttaacgagcagggttctgtaagagtgaatctacgtagtaaagaacttggatcctttacacttcaacccgacaaacaattgcaaatggaaactgtcatagtcggtatagaaaaagttgttacgacaaaaccagcaaagcagggcactaatgaagaaacggacggtaatttgttacttcgttttatgcaatcacattcagtaaataactatgatgatagagcaggtattaaagcggccttattatctttacctgatgttcgacaagcagaagtttacgaaaactacacaggacaaacagatcctgttactggcgttcctgcgcactcaatgaatgctgttattatcggcggcaataataaagatattgcgctgatgttaattaagaaaaaaattggcgggtgtgcattctttggtaaacaaacatgtgaaattaacttcgctggagcgaacagaaaaattaattttgatagagctgaaatgattgatatcaatattgatgttgcgttagtcagaactagcgaatttcatgatattgatatagatggcattaagtcagcattggcagccactaaatttaacatcggcgaatcagtttatgccatgcgtctgacatgccaagttaattcaatagcgggtttctatatcaaatcaattacagtcaatggctctgacaaagcaaatattggccctcggcaatgcgcagtcataaaacacgaaaatgtgaatgtggaggtgttgattgaataaaaaaccagaggattttttgatatggcagtacagaggaaaacccaaggcccggcaaacagtcgggcttttgctttctgagagcgcgatagttttcaaatcagcagttaagctgactgaaatactcgatattaataaatcagaaaactatggattagatttgatagggcgacacgttggcattagtcgaacaatgaaatcatttgtcccaaaagattacttcggctttctgggaatagatagcgcacttggttttaataccggtgttttctatagatacggggactctctgaatgattcaacaaatcttgatgacaaagattatcaattttttattaaagccaaagttatcaaaaactaccaacgcccgacaattggaaatataacattatcgatttcttacttgttgggagatcaagcgttcattatcgataattacgatatgacaatgaatattgttattccttcaagttatttaacccctttcaggctgcatgcgataaaaaaattggacatattatctcgtccaattggcgtgcaatataaatacatagtaatcactgatagccacccgtttggatgggctaatgatccccacgcgtccggtttcggtgatggaaaattcacgaggattgtagatgtcaatagttaacaaaccagactataaagtctttgctcaagatgccaaatccggcgagattgaaacgttccccgatgtgcttcgcggctggggtgtaacactagatagaactgcgggcaagccacctcttgagtggtttaatgcaatcggtaagcgcgttgatgagtggttaatgtacttatcacaacgcgggttagcagagtgggattcaactgtagactatccgcaatatgccgcagtccagcattcagggaagttttatgtagcactcaaacaaaacataagccaacaacctgacagatcacaaaataattggcagtcaatggctgattttctaggcgctccaaaattggtcctagatgctttaaacacaaagcaagacaaaggtgactacgctacaaacgctcagttgaataccgtgtcttcagaactgaataaatcaatcaatgcagccaacactagcgccacaaatgccaacaacaacgccaacactcgcctgtcaaaatcccaaaacggggccgacatccctaataaaagtgagtttataaaaaacctcggtttagtggaaacggtgaataaggcgaataatgcggtgtcgtcaatcagcggcggtacaatcaaagcgggactaaatgtgcaaagcgtgctgagcgtcggaataagtcaaaataaaaatttgcgtatttcatctaatgaaaccgctgatagtcagattaatctaattgtgtggggaaattcaaacagaaaaactattttcgaatgcggagataaaaatgggtgtttattttattcacatcgattgtcatctaataatgttgagcttttttcgactggaaaaattattccatctgattacagcaactttgatgcacgttatgacaacgttcccgccggtgttccaatgccatatccccaccgctacacgccgcccggctatcttacatgcaacggtcagacattcgacaaatctctatatccaaagctagcggaagcttatcctgccggtagagtgcccgatttaaggggagagtttatccgtggttgggatgatagccgtggtgtcgatccgggtcgggtgtgtggaacgtggcaagctgactgcattccagatcacaatcactacaaagtagcttcaaaacaattagttgaagaccttgtattgaccggggatgccggatggtatacatcatccggcagtagcacgcgcacacgttcacttgatcaaaatacatatacgggcggcgttactgaagctcaagtaatagcaaacgaaacccgtccccgcaacatagcattcaattacatagtgagagcagtataatggcagaacaaaagtattctttagaacatgaaaccgctgtattgggtaaagatggtttggcaattcaggcaggctggataaaggtttttcactcgaatcagataacgagagaattcattgcttcagatatcgagtatgtgatgcttggagttagtttatcagccggtgcttatcctgatgccccggaactgccgaaaactaatgatgtggccgtttgcagaagtgttgataaaagccgctgggaaatcctcccagactaccgtggcaaaatagcttacgacacgttaacgcgagaaccgactgaagtaacagaaatcggtgagctgcctgacacgctcacattcaagaagcccccaactgatttcgacacatggaacggtaaagactgggtagtcgataaagacttactcaagtcccatcaaatcaacgaagcaaagcaacagcaagcagcactgttacaacaagcaaatgaaacaatctctttgctacaagactctgttgacttagaagtcgctacagactcagagaaagaagctctactcgaatggagaaaatacagagtattgctgactcgtgtagatgtgaaccaagcgccgagtgtggagtggccggaagtgccgaagtgattagataattttatattttggagtaaggggagatggtttgtaagtggctataaatgccaggttttaaattggggttttaccagagttttaccaaaattttaccagagccaaatcccagccataaaaaaaccaaccctaacaggttggtttttctggggaaatttggtcggcatgagaggatttgaacctccgacccccgacaccccatgacggtgcgctaccaagctgcgctacatgccgataattcgtattatactactgattttttatctaaaagcaagtactgaattttgtgaccgattgatttttaagcatttagttggctataaaatgtttaacctcggttagtatctgtaacagttgtgctagattgggtttagcatctttgatttcgttgccttccaggtcatataggtggtagttgccatttttatccaagaacagggtattttcgctggttgtaatgatcagggaaccatcatcaccggtaatcacccacggattatcacgttgtgccgcgaatagatcttggccttgagaataatcagcaggagtattgctgacgtgcaacaaacgttgcattaatgttgtcatgacgtcctgatgacttgttagtttactaattgtctgtgatggtgttcctggccaatgaattagcagcggaacatgcatctgagcacgattaaatttgccattgtttatccatctagggggatgtgtcgtggcggtttcactatgttcagcggtaatgacaatgacagtattgttcaatgcatttttgttttttagtgtctctagtacggtattaatcggaccatccagagccgcagcattacctactgaatctgctttatctaagccacttagcctcaagaaggagaaccacggagcgttagtattgggtaaatttagccattgctgccattgttctaccgtgagttggttgctttggttgacttcagtgggcagtgagtagtcggaaagtaatgcatgacgataaagcggagtaccaaaccctacagaagagaataggccaaattgatatccctgatgggtcagagcattaatcaaggctgatgatttacgtccagccaatattccatccagataaccagaagaaataccataaaatagcccgaatagggcggtatcattttgaatgccagtgctgaaatgctgattgaactgaatattggtttctctgaaatgagagagcgcaggcatattctcggtaatatctctattatccagtttatcaacgactagtattaacaggttgtatccgtttcctttgtcctgataggtcagatcattaagtggatattccactgttagtgccgcaggatcaccttgttgcataagtcggcgctgatattcttgttgatcgagcagaccatgtttttcaagaaatttacgtgctgtcattggataggagagcggcaggttagaacgttgcatggtaatcgggcgataaaaattagcatcagcccagatatacatcaaatgggaagctaaaaaagccgaaataaggacagcagccagcggcttaccaaaccgttgccgattcaggctgcgtagtttctgccaactccaggtaccaaataacatctgtatcagaaaaatgactggaatacagatgaacatgagttgccattctcgcgccagttccccttgatcaggattgatgactaaatcccaaactaaaggtgtaaggtgaaggtggaaacggttgtatatggcaatatcgaatattaacagcgtcagcccggctgtggcgaaaatggctgaaagaaacctgagtaggcgctgcgacatggcaataaatgtcagtggaaacagaaccagcaaataagcggcaaaaacaataaaactaaagtgcccaagccaactggacaaagcatagactcggccgaacagtgagctcggccagtcagaaacaaacaggtaacggctacctaatccaagactaagcagaatattaaatagggcaaaccaatgcccccagctaatcatttgggaaactttttcacgataacgctgacggctagtcaccatattttgtttacgttgtagtcttagttaaagaattaatgggctttatcttcgtttaccgaagatttaagcgcgtgtgcaaacgagtcagcaatatgtctgcgctgtgcaggcgatatactcgtattgattaaatttgtcaccatattgcccagtaccattagagaaaggtctgtcggggtacggtttctttccagaacactgacgagttctgttaataaacgttcaacgtgttcgtcactgtaacgagatgactgtggcatagatttaaacttcctgaactaacaaagcacattatcttaccgtatagatgcgtgattttctgctcttttgtggcaaattaattcacggttaagattatgttgcagtaatagcctatttttggcaattttttgatatctgtcagcaaattatagttgatggcagatgatgaaacgttattttcttttggggtttttttattgcagtcgtttgttatcggtgtttgaatgcgtgtttaaaaatgcgtgaagtcagccgaaaggagtagaaagaatgagtctgcaaatagaccagattgccttgcatcaattaatcaagcgtgatgaacagacattagatgtcgtgttgcgtgattctttgctcgccaccgatcaagtggtggaagatatgatggctgaattacaccgagtatacagcgcaaaaagtaaagcttacggcttatttaatgaagagagtgaattggcagaagcactcagacatcagcgtaaaggtgatgaagattttcttgggttcagtcgggcagcaacggcacgtctgagggatgaactggcgaaatatccgtttgctgagggagggacggtcctgttttgtcagtatcgctatctggcggtagagtatttattgattgctgtgcttaatagctgtaacagtatgtctgttaacgataatctggatttaaatactacgcattatctggatattcctcatgcagatattgttgctcgtatagatttgacggagtgggaaactaatcctgaatcaagccgttatttaacattcctgaaagggcgagtagggcgtaaagtttcagatttctttatggattttctcgctgctagtgaaggtatgaatgctaaagttcagaataaaggcttgctacaagccgttgatgattattgtgaatctggtgagcttaataaggatgagcgtcaagcgtatcgccagcaagtatataactattgtaatgaacaattgcaggcaggagaggaaattgaaattaaggcgttgtctcaggcattacctacatttggagagcagaattttcagcagttttctcaagagcaggaatatgaactggaagagagtttcccggcggatcgcagtacgttgcgtcaactgactaaatttgccggcagtggcggcggattaacaatcaattttgatgcgatgttatttggtgaaagaattttctgggatccggcaacggatactttaaccattaaaggcacgcccccaaatttacgtgaccagttacagcgccgtagcagtggtcattgaggctaaaaaataaataacgccgcaaatgcggcgttatttactcggcgtcccgaaaagctcggctgtggctaattaagcacgcaggaagtcaatgtgtgccagttttggtttaaacggatggcgctgtacagcctgcactttaactttagtctctttaccgtcgataaccagggtcagaacatcgctataaaattcagctttttgttccatgttgataacctgatcgtgatccagttcaatagaaactagctcttggttgccaccgtatacgatagctggaaacttgttagctctacgcaggcggcggctcgcacctttgccctgctctttacgtacttctgcattaatagtaaacattattttttctctttaagaagaaaataaatcctgctacaggcgacccagcagcaggttcgagatttggcttaacatttaacatagagctagtgtcaagcgggcggcattctagcgaaaaatggcggttacagcaaatggaataggccaatctgaatctattagtacaattcgtctgctcgtcggaaacgtccttggtaatcaaagattttttcacgaatctgccagaatcgaccttttttacgggcgacaacaaaatctggatggcgtaataaaggttgctggtgaacgatatctgaggcggttttccagttaaaaggtatcgctgaggcacgttgatgctgacgaagaaattggtgctcaaaggctagccgctgggccggtgttgtaagccgaaagcgttccgaaacatcagcgccatcttcatcgtaatagataattttcagccattcgcctttactgtcagtttcagggatgagttgcatgccaccacaacgcagtaccagtgcatctttgagcttcaatgcggctttcaacatatcgtcgggatcgaccagcacctcttggcaactgtggcaacgccgcgctgcaatatcattttctgcattgcaatgagggcagagtttaaaacgaaagcggaactcacattgacggcgtttgccatattgatcgttttcccaaccctgacagcggcggccaaagtgctcaataatttcaccgtcggaggtgcattttccccaaaatatattagcgaagttacagatagggcagaatacttgaaccggttggctctgtttatccggtttattgctgccaacttctggtgtgtagagatcgtgaggatttcctgcataatcgagaatcaggcaatcttttttgccgggaaataatcgtaaaccacgaccgataatttgctgatataaactaacggattcagtaggacgcagaatggctatcagatcaacatggggggcatcaaatccagttgtcaatacggcgacgttaaccatatagcgcaatcgctgagttttaaaggcttcgataaaccgatcacgatccgcagttgatgtatcagcactgactaatgcggcttggccgggagggagtaattgaaaaatctctttggcatgttcgacagttgcagcaaaaagcataacccctttgcggtcagcggaatattcaatgatttgtctgataatgtgaggtgtgatgcgtttttgtcgtttgatttcgtggtttaaatcagtgtcattgaagatgctttgctgactggagcgaacttggctgaaatcatattgcataacgggcatatctagccgttttggcgggatcaggaaaccgtgtttaatcatataacgcaggggcaattcatagatgcaatcacggaaaaaacagctttcatcaccacgggtcatgccgtgatagtgatagtgatatatccagccgatagccagtctgtaaggtgttgctgttaagccaagaatacgtagttgtgggttattttgccgaaggtgatgaataatttgctggtactggctgttttcatcatcactgatacggtggcattcatcaattatcagcaaagagaattgattatcaaaatgttcaagattacgggcgacagattgcacgctaccaaacacgacttttcctgcactttgtttttgctgcaatcctgcggaaaaaatatctgctggtaaaccgtatgcgcagtatttgctgtaattctgtgcaactaattcttttacatgagccaatactaatactttcccacgagctaattttgccagttcagcaataactaggcttttacctgctccagttggtaatacaatgactgcgggttcatgatggtgccggaaatgattaacggtggcatccacggcttcttgctgatagggacgtaaagtaaaagtcataatcgtttcgtaaccgaaaaatattcgcaaaagagtaacatttttcttatcaattttctgtggacggaggtcaaagtcagataattatctgattgagtgaaactatgactggttataataaatagataattgttgtttatagtaaacatagttatgattagctttgaaatcttttggactcatttcatatcttcttttttggtggctctgtgttgtagtgccgaggtagtgccaaaatagtagtggatcacgttcacttttaaattaattaatacaggtgtcttcatccatgcgattggataaatttttgtcacaacagcttggtatcagccggaatgacgtagggcgcgagttgcgtgcgggacgcatcactgttgatgatgagattgtaaaaaccggagcttataaattaactccagagcaacaggtcatgtttgatggttcattattggaacagcaacaagggcctcgttattttatgctaaataaaccacaggggtatgtttgttccaccgatgatccgataaatccaacggtgctctattttattgatgagccggcagcgcataaattgcatacggcgggtaggttggatatggataccactggtctggttttgctaaccgatgatggtcaatggtctcatcgtattacttccccaaaacatcattgtaaaaaaacctatctagtcacacttgaatgtccagttgcagcagagacggcagataaatttcttgcaggtgtgcaacttaatggtgaaaaaacagtgacaaaacccgcccagctagaaattctggagccgcaaatagcccgtctgacgattagtgaagggcgttaccatcaggtaaaacgcatgtttgcagcggtaggtaatcgggtaaccgcgcttcatcgtgagcgaatcggtgaaatcatcttagctcctgaattggagccaggcgagtaccgatcattaaccgagcaagaaattgccagtgtcacttttctttaattttggttttagttaattattttaaattattggagcaatatacgtgcaacaacaacgatcatcctatttgggactgattctaatccttgggctactttctatgttaatgccccttgccattgatatgtatttgccgagtttgccgactgttgccgaggatttcggtgtagatagcggacaggttcagatgacgctgagcagttatattctcggttttgctatcggtcagatggtatatggcccaatggctgacagtttggggcgtaagccggttattctaggtggggttactgtatttgccttggcttcagctgcgtgtgcaatggttcagaatatcgatgattttatttatatgcgctttttgcatggattctccgccgccgcagcgggtgttgtcattaatgcgctaatgcgagatctgttcaccaaagatgaattctcgcgtagcatgtcttttgtgatattggtaatgaccattgccccattaattgctccaattcttggtggcatgataatgatttggttcacatggcatgcgattttctggagtattgcggtgacgtctgttattactgtattccttgtcgctttctttataagagaaactttaccaaaagaaaaaagacaaaaatttcatcttcgtacaaccgtaagccagtttattatgttatttcgccagcgtcgtgtattttgctacatgcttgccagcggtttttcatttgcgggaatgttctcttttctcagtgcagggccatttgtttatattgagttaaatggtgtttcgcctcagcactttggttattactttgcgcttaacatcgtatttctgtttgtgatgacgacaatcaatagtcgctatgtccggcgctttggtgcgttgaagatgatgtattttggtttgagtgtgcagtttatgatggggatctggttgttactgtctaccgccctcgattttggctttactgctctggtcatcggtgttgcagcttatgtatgtggtatcgcaatgattacatccaatgttatggccgtggttttagatgattatccacatatggccggaacggtgtcttcattggcaggtaccgttcgttttggtattagtgctttggttggtatattacttgccatgttacctgcacgtaatgcctggccaatggttggttctatggttttatctgttattttggctgtattgcttattatatacgcaaaaaagaggcgataagtaaaaacagaaggctgttttcatgtgcagccttttccttaaagagaaaattagggtaagcgaaaaatatttttgatgatgttgtctggttataattttatatgagattgttgaagagtttttttattctaaaatatatatctactttcgttgatatattcttgattgacagaggtaagatttaatattatttattaaagataacccattagaacagaaaattgtgctattttttgttattctaagatttgccattaagtaacgaggttgtaatagtttggtggtattagctgcattttttgtattactaacattatcattaaaaacgataatgttagtaaagagaatattttccctgaatgttcagggaaattgaataatgggttatgcataatagctataccctatggatttcaagatgcatcgcggcggcaagggtgcgagtgcagccaacaaagaagcaacttgaaagatgacgggtatatatgatgatgatattgatctatttatggcaaggtgaaactgttgttgcttcattatttttttattattactgttgcgtatttgttgatttttattttcttgttgagctgagcagctaactttctactataaggaaattccgaaatgttttgcaatgtgaatgaattgttattgatgcattgatagtgattataagtaattgttgtatttttgttaaattaaaaaatattaaatggcgttatcattaggttgttattaattataccttataaaacacattgttatctatttgtttttacagttcttatttgatttttatgttaaagtgttgagttgaaaaaataaaatatgtaaacaatcattaaacataaagttggatttttgcataaaaattagttgagttttctttaaaaaaagtataaatatatgagaaatgagagattgatctcactttttctaaggtgaaatttggaattaatgtaatactataaacacaaatttaacttttcgtttactttttttgggggttagttattcggttttggcgagtagaacacctgaagatagccgctaactttaacttttgtatctatgttctttcaggtaggaatgattcgtgaataatattcagctttcggtagtacatcggctgccgcaaagttacaagtggtcacccggttttgtgggtatcaaagttgagccgcttccggttgatgaagtgaatgcagaaagcagcctgatggggttgaagttactcagccacgaagacggggctgcgtggaatgttatgcaaaaattacagcaatcgcttgctgatatgcaaattggaagcactgtgattgagttggaaggtcaaccgtgcttatttattaatagtgaagatgaaagtgcggttatgtgtcgtttgaagacacttggcgctgccattgctgaaaagataactgcgctttatccattttgatatatcccctatggatttcaagttgcttcgcgacggcaagggaacgaatccccgggagcatagataactatgtgaccggggtgagtgagtgccgccaacaaagaggcagcttgaaagatgacgggtataaacgcgaaaagcgcttcctttgatggaggcgcttttttgtgggcaagggaaaaattttcagcttttagccgttaggcattttttagccattaggcacaatgctattactgatgactcggcgaccgctataataacgtttgctccagtatgtgctgcttaatctggaaacgattacaccattgctagtagaggcgtgaacaaattggtcattgccaacatagatgccaatatgcctggtacgggcacctgtcttaaataaaactaaatcgccagggcgtaatcttgaacggtcaatttttttgccaatattctgttgttcaaatgttgaacgcggcagttccataccaaactggtcacggaaagtacgttgaacaaagccagaacaatctataccgcgtttagtaacgccaccgagtcgataggcaacccctttccagccattgtattggctaagaattttagattttatgtccagattgcgaacgagtgcttcgaattcatcctgagacgcttgaagtaagaagccgttcttaccgtttactgcatgcgtatcagtttgtgtgttacgaaaccttgatgaatctggtgagctgcacgcggataaggtgatcgctacgaacagcgcgggtatcagccgcgtaatgtatctcagtgccggttgagacttgaccattatttttgttttcccttgctatccttaccttagttggtcgctattattgaaaaatatcaaacacttcaaagcctggtgttagaaaaaacaatgagtaaacaacgcgcttagtaaaaaaacgcgtctgatgccacgttttataacgatatttacaataaatgttattcagcttgagagtacagaaacaatcaggaaaaggcgagtatttaatgacataatttacaaaaaattagatttctaagtaggagagatcaggtgtgttgctaatttatgtgggttttatgaactattgggaaggttaaataccttcccgatatgattcagtaaaaagagtttatggaaaagatcttaaattgggcgaccaatttgcggcagattcttatccagccagttaatcattatgtcacttaatggtgttaatagtagccaacttgttccgatgagtatcagagataaagaaccgactgcaatatcagtaaaccagtgagcgcctgccattatgcgaggtaacgcaaatattaccataatgagtaatgcaatacagaatgctctgcctgaaatatatcgaagaataaagcagctgaaaatcaggagcattaatccgtgatcacctggaaagctatcgcttgatgcatcttttgttaccagattggtcatttcgctaatacgattgatatgatcgaaggttaatgttgggcttggacggacaacagggagtaggtgaccgatttggttaagtataactgcgcttattatcatgaccaaaccaatcatgaataatctgcgtttgccatcgtaattctgtttacgaaaagcgttgtaatacagcaatcccatacataaaagtgaaatgacatcgaaggccctgatattcacaaatgctacaaattctgtgaatgttgagcctgatgttaatttctcattaaagaagtagaagattgcagagtcgatcttgagccagaaaccatgatgctctggtaaataccaggagagaaataaagtgatccctaacaggttcagtataaatatggcaaatgggtgactgcgtgtcatgggagacctatttgttaaaaataagataagtggtaactaaacttacaattatgtaggttaatataacaaatattgagtaataatgtcaccgctcttaatcataagttaatttgttgtttttttatctacttttttgtgcttttcctgcatttttttatttactttggtaactattcctgcccaattctatggattttattgagtgatattggggtgtttaaggttgtaaattcttaatttattgagaattacttctgataattctaatattataagatataaatatcttaatcagttttaatcgctaaaaatcataaataaacaatgaaaatagccgttaccaatatatagactcataaatttttccgatttctagattgatttcatttttggaaattgcagcgaatgatgctgttttatggtggaggctgtatgtctatgtttcgggttataatgggttgtttttttctgatgatttctggtcttgtcaatagtgagccagaaacagcatcaaatacaggggttattcgcttttctggtgcgatcgttgaatcaccgtgtcgttttgattggcgtgataactgggctgacaccacgtgttggcgaaaaggacataagattatccaacgacgaaagctcgatttgcaaaatgatatttatttttatttaccacaccaaatcggtgtaaccgagattaaatggataaaaggaaaagagaaaattggcgttgttacaattttctataattgatgttaagaaaaattttataggttatttattcaatgtttaattgaagaagcatcggggttttatctgtcattgctaaaatgaatgagtgacagagttatattttatttgggagtttaaattatgcccaaatgctaatagaaagtagctgattgatttaatgaatggaataggtgaaaagtgagttaccctgttttatacccgtcatctttcaagttgcctctttgttggctgcactcactcaccccggtcacatcgttatctatgctcccggggattcgctcccttgccgtcgcgatgcatcttgaaatccataaggtatataccgggcaactcagaattagctaatattgttaatcgcaacgtcccatatagcggcgttctgcaatatgaatacggattctttccccgctactgatatattcaggtacttgcacggtgagtccggtgctcattttggccggttttgttcgtgcactggctgaagcgcctttaattccaggggctgtttcttcaataaccatatcgactgtttgtggtagttcaagggcaatgacttgtccctctattgtcagaacttgcataccaggcaggccaccttcaggaataaataataactcttcttcgatttgttcctttttaaagtgataaggtgtgaaatcttcatcatccatgaaaacatattcatcaccatcaatgtaggaaaagttaacgctacgacgagttaggctgatcgtatcaaggatatcatcgcctttgaagcgttcttccactttctgaccggtgcggatatcagtaaagcgcattttatataatgtgctagctccccgggcgcttggtgcttgaatatcaatatctttaaccagcagtaacttaccattataactgacggcgctaccgcgtttaatttcgttggctttagccatatgtaaccttccataaaaccataagagaataatcggcgacaaaattactcgcagtcaagacattaggcaagtagggattaaaaaaccccactgtttttttacattggggttgtagtaagaatgttttatatgtcaatgatacacaggtaataaatcaagagaggacaaaatatgggctatagcatttatcaaaccaaacagaatgacgaacccaatgaggaatttccctcctggtgctcggtaactggcttcagggaagcgctggcgacttgccctagccatcagtgctggaataatgacagcccagatggttgcagcgaatccagcaaagccaatggcatatagaaaaccattggggaacagtaaagctagcgctgttggcggaataaatgtcactaatgcagatgttaaccggccggtgttgttatctttaaaaccgaagaaatcggctatgtaatcaaatagccctaaagagacaccaagaaatgaacttgctaatgccatataagagaaggcatttagaagctggtgaacggttttgctgtttgttgtattatccatgtgttttaataaatcaccgatattcccgccatcagcaataatctgtttgaatgcttcgcggggaatatttccctgaatgacatattgccataggatataaatagttaatgcgattaatgtacctaataacaggctgcgaataacggcttttctatctttatgataatattttactaaacttgggatgttaccgtgatatccgaatgaaacgagtaaatagggtagagcggttaaagcgtaagatatataacttgttgccgtgtcgtttgatgtagtatccgtctgattaaacaaaatgacatatttaacttcggtaaacatgccgccaacggacataaaaaaagtaataaccataccgccgatcaaaattgtgctcaaacgatcgacagcttgagtcgataaccagacaataaatgcaacgataaaagcgaaaataaagccagcatttgcctgtgatatcgaaataatatttttaaaattgtgggcaataattgagccacccgctgaaatataggcgtaggttaatatataaagcacgaatgcaatagagataccattgattgcattccatcctttaccgagtaaatctttagtcatggtatggaagcttgcacctgatgggtagttcaggttggtttctagtatcatcaagccggagaaatacatacacacccatgtgtaaaccagcagaataattgagccagtaaaccagacaccggaagttgccacaggagtagagaacattcctgcaccgacagcagttccggcaatgatcattgcaccacccagtatgggagggcgctttaaactctggggtgtctcagtggacatattaactcctactggtatattgtttctttgtactagcttaaagatacattcttgtctatagagtgtaaatagatgccataaaggattatttgaaattgaactaacataagttagttcattcagtaagataaaatttattttcttgccacatttttattgcattccggctagcttcaaaatgaggttcaggaagattattgggatcgcaccacataaattgttcacatttttctggttccatcaattttggttcaccacctggatgttttgccagtaaacatactgaaatagtatgttttccttcctgttggtaagtttgaagattattacaaataccgtagacctttggtgattgaatcgtcagacccgtttcttctgcaatttcacggattgcacattgctcaaaagtttctccggcatcaacatgaccaccaaagattgaccagtatggagcatgtttactgctacgttttccgagtaatacttgaccacattcgttcacaataaccacaccaacacccacaatgacagacattttgtttattcctttcatttaaatttcaataaattagcaatctttttgagaaaaattcaatgctattcttatccggaaaccaatttaagacaacgatcaataaagtacggaatttaactgaaacgattcaattttagtgatataaatagaactgaaaattcatagtaatgatgattattatctatttaggagacatcgggcgaaatgagccgtagagttgccactatcaccctaaaccctgcttatgatttggtaggattgtgcccggaaatcgtcaagggagcgatcaaccgagtgcaagccgctggactgcatgctgctggtaaaggcaataatgttgctaaagttttgcgtgacttaggtattgatgtcacggtgagtggttttttgggtaaggaaaatcaggaaggatttcaacagttcttcaatgaaaatggtatggtaaatcgttttcatttagtaccaggcagaacacggattaatgtcaaattgacagaagaaagcggagaagtgacagactttaacttcactggtttttatgtcggtgaagctgaatggtcgggatttgttaatgattcgctttcatggcttggacagtttgatatggttgttgttagtggtagcttaccggctggtgtctctgctgaatcgtttactgactggatgacctgtctacgtcagctttgtccttgcattatttttgatagcagccgtgaagcattggttgcagggttaaaagcatccccttggttagtgaagccgaatcgccatgagcttgaagtatgggcgggacgtctgttacctgagttgtccgatatcatcatagcagcacatcaacttagggatcagggaattgctcatgttgtcatatccttgggtgagcagggggcattatgggttaatgcgtctggagcatggttggcgaaaccaccacattgtaaagtcgtcagcactgttggggctggtgattcaatggttgggggcttggtttatggtttgctgatgcgggaatccagtgaacatacgttgcgattggcgaccgctgtatctgcacttgccgttagccagcctaatgtgggtatcagcaatcgtcctgaattagctgccatgatggccaaagttgaactgatacccgttagataatgcgttaattaaagaatcattaattttgttgtaatttcagccaggcaatttcttgcggccaaatatctgggtttattgtttcaaggatgagtggaataccatcaaaacgagcatctttcataatataactgaaaggtgttttaccaatatttccttctccaaggctatgatgtcggtcaacacggctggcgaattcacttttggcatcatttaaatgcattccgcataaatattgaaagccaacaattttttcaaactgttgaaaagtttgttcacaaacatcgtttgtacgtaaatcgtagccagcagcaaaggcgtggcaggtatcaatacagacacccactcggtttttatcttcaactccatcaataattgctgccagatgttcaaatttaaaacccagattagtgccttggcctgccgtattttcgataacagcagtgactctctgggttttattgagagcaatattgatagattccgcaatacgcgccaggcatttatccacatctactttattgagatggctgccaggatggaagttcaataaatcgatccctaattgttcgcaacgttgcatctcatcaataaaagccagtcgggatttttccagagcttcactttctggatggccgagattaatcagataactatcgtgagggagaatttgtcggctaccatatccataacgttcacagttttctttaaatttatcgataacgtcagcggctaaatgtggagcatgccactggcgctgattttttgtaaatagggcaaaggcggtagcttttagttcgtgcgcccggataaccgcttgatcaactccgccagccgcgctgacatgtgctccaacaaatttcatatttttctccttcttgctttctttacgtcattatggattatggcattgttcaatcgctcaatgaatcttaagaacggaaaagtatatgttgctgaaataaaatttctccgagtggattctgatcagccaaacagatgttgaatgccaagatttattaaaagaccgcccgccatcagccatacaaacaaaatgagagctaataaaatgggtttaaatccggcctgacggatggcgctcacatgagtagttaaacccagtgcccccattgccatagtaagcataatagtatcaatattaatcagagaattaactattgcagcaggaagtaaattgaaagaattaaaacccgctattgcaataaaaatcactgcaaaccaggggatagttattggtgttttctcctgatggtttctgccatttttagtgtcggcatggttaatataacgggataataacaacaggaatggtgctaacatcataaccctgatcattttactgataacggctacgttttccgtttgatcgctaatagcatgcccaacagcaacaacttgagcaacttcgtgaagggtggagccagtaaagatgccgaaagtttcctgagtaagtggtaaccactgataatgctcattgagttgataaaaccacggataaatgaaaatagcgatagtgccaaagatgacaattgtcgagaccgcaacagcaactttactggcaggggcattcactactggctctgttgccataatagctgctgcaccgcagatactgctgccggcaccaatcagtattactgtttgctggtctaatccaaagagtgatttgcctagccaaattgcaataaagaaagtggaagacaacatagcagcatcaatcagaaggccggtaatgccaacatcggcaatttgttgaaatgtcaaacggaagccataaagaataatacctgcccgcagaagataatgttttgagaaatgaataccctcatcacaataaggtttgagtaaaggatagacagtattaccgacaatgatccctgcaaggatcgccagtgttaatgtacccagtcccatattaataaaccacggaatatttccggcatagattgaaattgcagtaagtattgccgctaatattaacccaggtattaatttcataccgggaatggatgattgtttgctgaattttttggcatgaatgtcagacatagatgtttctcacgttgcttatatgttttaaacataagcatatagcagacttgtttatcattaaaattgataatatttttatatataatcgaaaaaattggtaagaaagtagatttttgttaagttgtctattgccgtataaaattaaaacaagctaactttgactgacaccatattttgcggggcaatatgcacatcacattgaggcagttggaagtttttactgaggtattgaaaagcggttcaacgacgcaagcctctcagcaattggcgctatctcagtccgcggtgagtgcctcattaacggatctggaaagccaacttggcgtacagctttttgatcgagtaggaaagcggttggtgacgaatgaacatggccgcctactctatcccaaggcgttggcattgctagagcaagccggggaaattcagcagttattcaaacaggagttaggagcgttacgtatcgctgccagtagcaccattggtaattatatgttgccggaaatgctggcaaattatcgtcaggattttcctgatacgccgctagagttaaatatcagcaatacgcaggatgtcatcaattctgtgctggaattccgtgttgatcttggtttgatagaaggttcctgccatagccctgagttgataactcagctatggatggaggatgagttggttattttttcttctcctgaaaatccgctagctgaacaggatctaaaattggatgatttagttaaggcatcatggatattaagggagaggggatcgggtacaagagaagtgctggatcatctgttgtttgtccatttacccgggttcaagattttgatggaattgggaaattctgaagcgataaaacatgcggtcaaatttggtatgggtatcagttgcttgtccagacgagtcgttgcagagcaattgcaaaatcgtactttactggagttaaaagtgccagaattaagacttttcagaacattgtacctgattcatcatcggcaaaagcatatgtctatcgcactgcaaaaattgcttagttactgccggtaaattttgcgttctgtttaaaatccaaaattagctgtgttacttataattttctctaaattatgaaggtatcttataacagcgcttcctcgctattttgatagtgaggatttgttacaatccgccatcagatttattcgcagctaacaggaacagaatgtctcaacaacaaaaaagtgtttcccggaaacccgcaacgcaacatttgcgacgtgaattgaaagctcggcatctagcgatgattgccattggcggatcaataggcaccgggttattcgtggcttcaggtgcgacagtttcacaagcagggcctggcggagcattactttcctatgcattaattggcttgatggtttatttcctgatgaccagtttgggtgaactggccgcttatatgccggtttccggttctttctcaacttatggttccaaatatgttgaagaagggtttggttttgccttgggttggaactattggtacaactgggcggtgactatcgcggtggatttggttgcagcccaattggttatgggttattggctgccggatatgccgggttggatctggagtgcgttattcctcgcgttgattttcctactgaattttatttcagtgaaaggatttggtgaagctgaatactggttctccttgattaaagtcagcacggttattgtttttattgtggtcggattactgatgatagccggcatcatgaaaggggcagaaggtgctggatggcataactggactgttggtgatgcaccttttgccggtggtttctctgccatgattggcgtggcaatgatagttgggttttcttttcagggaactgagctaattggcattgcggcgggtgagtcaaaagatccggcaaaaaatgttcccagtgctgtacgtaaggtattctggcgtattctgctattctatatttttgcgatcctgattatcagcctgattattccttatactgatccaagcctactgcgtaatgaggtcggtgatatcagtgttagtccgtttacgttggtatttgaaaacgctggtttgttatccgccgcagctatgatgaatgcggttattttgacggctgtgttgtctgcgggtaattcaggtatgtatgcatcgactcgtatgttgttcacattggcaaaagagggtaaagcaccgaggatttttggcaaattatccaaaggtggtgtaccgcgtaatgccttgtatgcaacaacggtggttgctgcgttgtgtttcctcagttcaatgtacggtaaccagaccgtctatctgtggttgttgaatacttctgggatgaccggttttattgcctggttggggattgctattagtcattatcgtttccgccgtggttatgtcgctcaggggttggatttaagtaaattaccttatcgttcaggatttttccccgttggcccaatttttgcgtttgttttgtgtctaaccatcacattaggacagaattatcaggcatttctacaagataaaattgactggtatggtgtcactgcaacttatgttggtattccactcttcctgttgatttggtttggttacaaattagctaggaaaactcactttatcaaatatagcgagatgaaatttcctgatatcgagaatcagtgaatgtaaatacgttaaatggtgattaacaggccggtaggaatctttgaaaaaattcctaccggcctggttttataccctatggatttcaagatggatcgcgacggcaagggagcgaatccccgggagtatagataacgatgtgaccggggtgagtgagcgcagccaacaaagaagcaacttgaaagataacgggtatatggtttttttaattcgattcacgattaatttattattatcttaatgttttatttatttgagtagataagccgtttttgataagaaattaaaaagatacccctgttttgtgatcaaataggtattttttatttttcatagtgttaattcatacaattaatcacgtaatttaccaaaatttgtgtagatcatattgataagtattctcatttgtcctattgttagtgccataattattaatatgaaagggctaacaaaatgaaatttatgtctcgatccatagcaaagagtatcagtgtcggcctgttagcgggttcggcagttatggcaagcttcgcatcatgggctgaaacggtcaccgatatcgttggtcgtactgttgaagttcctgagaatgtaaatcgtattttgttgggcgaaggccgtttgttccacgctatcgctttgcttgaaggcgataaaccactggcccgtattgcgggttggcaaggtgatttccgcaaactggacccacagtcttacgccgtctataaagctaaattccctgagattgacaaagttcctttgattggtaataccagcgctgagagtgtcagttctgaaaaagtattaactctcaacccggatatcgccatttttggcttgtctggtcatggccctggtaaagacagcgaactggtcgcccaacttgaaaaggctggtgttccggttgtatttgttgattttcgtactgagccgttaaagaatacgctgccgagcattcgtatgctaggtaaagtactaaatcgtgaaaaacaagcggcagaatatgccgatttttacgagaaaaatgtaaaactagtgactgagatcaccaataaaatcccggaagagaaaaaacccaccgtatttatcgatttgagagcgggtgcttttgaagactgctgtgcgactgccggtgatggcaatatgggtaactttatcgatttggctggcggtaaaaacattgctaaaggtgttctgccaggcgcacttggtaatatgaacctcgaaaaaattattgcagttgacccttatatttacattgctagtggggcaaaagcgccagacagtaatgaaccaggtgtaaaactgggtgcgcaatctacgtctgaattagcaaaagccagcctgaaacaaatgactgaacgtaaaggtattagcacgttgactgcggtcaaagagggcagagactatgcgatttggcataactactacaactctccctataatgtggtagcgactcaggtatttgctaaatggttctatcctgagaaatttacagatttagatccacagaagacactgaatgaattacacagtaaattcctggcagttgatccatcaggggtttattgggtcagtgaaaagtaatcagtaagtcaggtaacgggaataatgagtgctactaccgagccgatgccaatggtgaaacaacaattagatgacagcagtgtaaaagcccattaccaatatattttacgccgccgtattgtgatgatggttttcatcgtgctgattattggtgtttcactggtattagattttacgataggtccatcaggtttatctttgtcatctctctggcagactttagtgtcgccagagagtgtggatgcggggactcgggtaattgtttgggatatccgtttaccctatgccctgatggcggtagtgattggcctgtcccttgggctggctggcgcggaaatgcagacgatcttaaataacccattagccagtccctctactttaggggttgctcaagcggctgcatttggtgctgcgttggcgattgtatctggtattggtatcccaggcgtgcctgatcagtggttcatctctgcgaatgctttcattttcgctttgttggctgcattggtactggatacgatcactcgttggacacgcgttgctacgtctggggtcgtattatttggtattgcattggtctttacctttgaagcattggtttccatgatgcagtttatcgcaacggaagatacccttcaggggctggtactttggacaatggggagccttgccagagcaacctggataaaactgggtgtgatgttattggtgtttgcagccatttttcctatttcaatgatgaattcctggagactgacagcgctgcgtttgggtgaagatcgtgcaatcagttttggtattgatgttcgtcgtctgcgcttggggacattattgcgtatcagtattcttgccgctttagcagttgcatttgttgggccaattgcttttatcggtttaattgcgccacatattgcccggatgatgtttggtgaagatcatcgtttctatttaccagccagtgctctaattggtgcattggtgttgtctatggcgtccatcgcctcgaagaacctgatcccaggtgttgttattcctgttgggatcgttactgcgttagttggggttccattcttccttagcataattttacgtcatagggcgaatatatgaatccgggattagccattaacaatttttttgcaggttatccgaaacattcggttattgaaaatctgaatattgctccgttgcctcgtgggaaaattacggtactgttggggccaaatgggagtggtaaatcaacacttttgcgttctttggcgggcttaaattgtgcaagaggtcagctttggcttgatggtcaagatttgatgaagatgagttttgtccagcgatcggaaaatgtggtttatttaccacagagcttacctgctggtgttcatttgcatgtactggagtcaattatcgttgctcaacgggcatctggagggcgtcattctgaaaccagtgaagaagaagtgatgttgctgttacgtcagttggggattgagcacttggcgttatgttatttagatcaattatctggcggtcaaaaacaattagtcggattagcacaatcattaattcgtaaaccaacattattattattagatgaaccacttagtgcgctggatttaaattatcaatatcacgtaatggcgttggtggcacaagaaacttatcggcggaatatgattactgtggtcgttgtgcatgatattaatatcgctttgcgtcatggtgaccatgtattaatgttgcaaaaagggcatttaattgccgagggaattcctgagcaggttattacgccagatagtctggcacaggtttatggtgtcaaaggcagaattgaacgttgttctcagggcattcctcaggtattagttgatgggttggtttcaaagctagcgagtgagaattcattttaacttataaaataataaaactacacagaggtaaatattttatcctcgttatttgagcacatgttgattatccatttttatagataaatttatagataaataaagtgtaattatatctcttggagaatcgggaatgggtgtttttaataaaagaaaaatcgcgttaggtattattgctacaatctcatctggctcagtttttgcggctagtagcagtaatgacactattcttgttactacggcagcaggttttcaacagaagattgaagatgcgccagcgtctatttctgtggtgagccgtgagcaattggaaactaaggcttatcgtgatgtgactgatgcactgaaagatgtaccgggtgtcgttgttacaggtggtgctagcagcagtgatatcagtattcgcggtatggcggctcaatatacaatgattttggttgatggtaagcgtgttgatacccgaggtactcgcccaaaccgtgataattcggggattgaacaggggtggttgccgccattggccgcgatagaacgtatcgaggttgttcgtggtcctatgtcttctctttatggttctgatgcgatgggcggggtgattaacatcattacccgtaaggcacagaaagagtggaaaaccagcttccgcgctgatggcactttgcaggagcgttctaaatcaggtaatagtcatcagagtagtgtgtatacttcaggtccaattattgatggattattagggctgaaagtgagcggcctgtattctcaccgtaatgaagataaatttatcggtggttttaacaaacaggaaatgcgtaatggttcagccactttctctttcactccggatgagcagaatacttttgattttgaagcgggacgttatgagcaagatcgtgattctactgtagggaaaacaaagacaagtagttggcgatctccaggtaatagtgaaagtcgatataaaaggaataattactctatcacccataatggcgtttacgattttggaacgtcgacaacgtacttccagcgtgatgaatcacgtaaccctggtcgtgatatgaaatattacgataatctgttcaatactcataccgtatttatgttggatgatcattcattgagtataggtggtcagtatcgttatgaagatttacgcgatgaagggaatcaattagcttctgctaaaaatatcaataagctgaaccgttggagttgggcgttatttgctgaagatgaatggcaaatgaccaatgactttgctctgaccggtggtatccgcatggataaagacgaaaacttcggtgaccactggactccacgtttgtacggtgtatggcatgttgatgaacaatggacgattaaaggtggcgtttctacaggatatcgttcaccagaattacgtcaggcggcatctaattgggggcagattacgggtggcggtggtgatccagcgattatcgtcggtaatccagatttgaaaccggagaagagcttcaatcaggaaattggtgttatctggaacaatcgggataactttaatgtcggtttaacaatattcaacactgaatttaaagataaaattactgaattacgtcgttgtaccgatccaagtggtaaatctcagggcaaatgtgttattgatggcactgcttataaatttatcagtgaccgtgtgaacattgataaagccaatatgcgtggtgtagaagcgacgatgaactgggatattgttgataactgggtattggctgcaaactatacgtatactgattctgagcaaaagagcggtaacttcaaagggaagccgttgaataagatgcctaaacatatggcgaatgccaccttaaactggcaggcttcaccagaaatgcaagcttggacccgtgttaactaccgtggtaaaacgtcgaattatttatcacgtacctctatggggacgggaacaccgtcttatacctttgtggatatcggtgtcagctattatctggctgaaggtttacgcttggtagggggggtatataacgtctttgaaaaacaagtgactgaagacacccatgatatagtcttggatggccgtcgttataacattggtatcaattacgacttttgataatgcgttctaactaactataccctatggatttcaagaggcatcgcggcggcaagggagtgaatcctcgggagcataggtaactatgtgaccggggtgagtgagtgcagctaacaaagaggcaacttgaaagatgacgggtatattttataatcctccttgtttgtcgctgataagggggatttttgcttttttgcttatacctgtaaaactgaatagaaatccgttttgtgttgtgttaaaacttagccatgtcaaagaaatgtatatgacaccgttaaattccatagcgtcatcaataagtgtggtaaaaaataatgaacttttagtgcggcgagtattgctatttcaggtcttcaagtgcagaattcgcccactggaaaataactgatgcgtttatatgtgtcggttattttttttgctttgacttattttttactataccagaggccggactctgagccggatagataattggcccacgatcaaccgcgacgagaatcggttgccgtaatgaggaacgctaatatggagcaattatttcctttcgcacttgtgccaatcggcacatgctgctgcatcgatgactatggagcattgagctctgcatataatccagcctctaattctactgcctataggcagaagcgaagtcttcccagtaactatcgattaagtagtgttataacacgcatcggagttatgggaggtttcgctcatgtctcataatactgtaatcactctaggcaccaaccagacgggtgctaacaatcgtgttcagctcagaaaaacactgaccttggttcaggtagtgatgatgggtctcgcttatctgcaacctatgactatctttgatactttcggcattgtttctggtttgactgacggccacgtagcgacatcctacgcgattgctttgatcgcaattctgtttaccgccgtgagctacggaaagttggtaaaacgtttcccatctgctggatctgcatatacttatgcgcaaaaatccattagtccgcatgttggctttatggtgggttggtcatcgctattggactatatgtttatgccgatgattaatatcttgttagcgaaaatttatcttcaggccatttttcctagcgtagatccgtggatcttcgttgtgggttttgcattactgatgacagcttttaacctgcgtggcattaacgttgttgctaatctcaacacggctattgtcattgttcaggtaaccgttatggttgtatttgtgggtttactgatccacggtgtgtacaacggagaaggagtaggaactttatggaatgcgaaaccattcgtttctgaagatgcccatttaatcccaatgattactggggcgacgattttgtgtttttcatttctagggtttgacggcattagttcgttgtccgaagagactccgaatgctggtaaggtgattccgaaagcgattttcctgacagtattaattggtggtgttatcttcattgcggtttcttatttcttgcagctctattttccggatatttctcggttcgagaacccggatgaatctcagccagaaattatgttgtatgtagcaggtactctgttccaatccattattttggtgttctcttgtgtcactgttttggcttctggtatggcggctcacgcgggggtttcccgtttgctctatgttatggggcgcgatggtgtatttcctgagaaaatatttggctatgttcatccaaaatggcggactccggtaatcaacgtatcgctggtaggcatcatcgggttatctgcgattacctttgatctggttactgcaacagctctgattaactttggtgcgttgatagcgttcacctttgtaaacttatcagtcatttctcaattctatatccgtgaacgtcgtaaccgtacattaaaagataccattaatttcttggtattacctgtgataggggcttgtactgttagcgtactatggatgaatctggagcaaagttctatggaattggggctaacttggggagcaattggtctggtttatatggtattcctgactcgtcgcttccgtcagccgatgcctcaatgctctgaaatggtttaatatttagcaaaagaataatggcgccgaatttggtgccattatttttgctatgcagctaattttaccgtaatagttaaggaaaaggagcccaagaaaaaaaacagcgaggtcgcttacagataagaaaaatttcaaggtaaacggagaaaaacaatctatgctctgagaggtgattgtatattaaggaagagactatgaatgatgcaaagacctctcaaaatcaacaactcattactaccctgaccaatattgtcggtaaatctcatatcctgactgctccccataaaactgaacgttatcgtaaaggctttcgctccggccagggagacgctttagccgttgtatttcccggctcgttggtggaacagtggcatgtgtttaaggtctgcgttgaagcagataaaattatcttaatgcaggcggccaacacgggtataaccgaaggttctaccccgaatggtaagggttacgatcgtgacatagttattattagtacgctgcgcatgaataaaattcagattttaaaacagtgtaatcaggtagttgcgttacctggcagtacattatggcaacttgaacgtgcgctcaagccgctgggacgtgaacctcattcagttatcggttcttcctgcattggcgcttccgtgattgggggcatctgtaataactcaggcggttctttagttcatcgtgggccggcttataccgaaatggcattgtatgggcgtgttaatgagtgtggtaagccagaattgattaatcatctgggtatctatttgggagaaacaccagaagagattctctcttgtctggaagaacagcgttacagtgatcaggatgtagaacagggtcagcgtaaagcatctgatcatgaatatacccaacgagtacgtgacgtcgatgctgatactccatctcgtttcaattctgacgagcgccgtttattcgaagcttcaggttgtgcaggtaagttggttgtgtttgctgtccggctcgatacttttccggcagagcctttgtctcaagtattttatattggtaccaaccaaacgggcgtattgacggaattgcgtcgccatatattagcaaattttcataatttaccaatggcgggtgaatatatgcaccgggatattttcgatattgcggaaatttatggtaaagatgctttcatcatgattgataagcttggcactgataagatgccgacttattttactttgaaagggagaatggacgctattttcaaccgagttccatttttacctgtcaatcttattgatcgcattatgcaggggttaagtcgtttacttccttcccacctgcctaagcgtttgaaagaatatcgtaatcgttttgagcaccatttgatattaaaaatgtcaggtgatggggtggaagaggctagaagctggttggaagactattttagccgggtggaaggggatttctttgcttgtacgccggaggaaggtgctaaagcgttcttgcatcgtttttccgctggtggttcagcgatccgttatcaagcggtgcatagcaacgaagtagggaatatcctgtcacttgatatcgctctgcgccgcaatgatcgtgaatggtttgaacaattacccccagagtttgatgatgtattggtacataaactttattgcggacattttatgtgctacgtgtttcatcaggattacattgtgaaaaaaggggtggacgtacaggcattgaaagcaagaatgatagagctgcttgataaacgaggagcggaatatcccgcagagcataatgtgggtcatctatatcaggctaaacctcaacttaaggctttttatcggatgtctgatcctactaatactctcaacccaggaattggaaaaacatccaagctgaaaaattggggcgaaggatcttaatgtcaatattctcagtagtgacaatgctatgctagtactcagtgtaaagattgatgagaaagttactcttatcaaaaaggcgagtatatatgactcgccgttttatatttattcacgccccgcttaattatccagccagttgcactgcatattccatgagtgctttaagttgacgacatttttcttcgttgccttgatattcagtaaagagctgttcaattataaagaaatattcactgagtttatcctgagtgaatatttcttgacgatgacgtaaccagtgttgttgttcatcataagtcagagtcgtagggtagtttctggctctatagcggaataacagcgttttaatccgtgagtcttgaaaagtcagatcgagtgccggtaaattctgaggcagagtctcacggataatattcattgctgctttatcggcactgctaaaaaagccatcatacagcttagtgtcaacattattggattcagggaaaggttctgcctctgcaaatagctctacaactttttctctgatttgtggattattttgcagaatagctagatttcttccacaataatcacgatccaaaccgatacgttcagcgtcttctgtgcgcaaagtattatcgggggcgactatcgggcacttattaatatgaaccagttttatcgggactggtggttgatctggttgcaattcatcatggcgggtatatagacgttcacgcaatgcatctgcatccagttccaataatggtgaaatatccccagctaaatcgcacacaataacggcattctgattggctggatgccaggcaagaggtgcaaccaaactgaggttgctgcgagcagcaccaaacatcccggaaacatgaaccagcggtttcatttgggggatatcgatgagagcgttaattttctgcttatttcttaactgaaagaaataattgaacatccttggctgtacttctttgagtaattttgccattgcaattgtggcgtagacatcggacatagcatcgtgagcatgtgaatgttcaacgccatttgccttggtcagatgttctagtttaaagctgggcagaccctcttcattctcgggccagataataccttcgggacgcaaggcataacaggcacgtaatacatcaagtaaatcccaacgggaattacctttttgccaactataagcgtatggatcataaaaattacggtaaaaaatattccggctgacttcatcatcaaaccgaatgttgttataaccgaggatacaactgttcggtacactgaatgcattatgaatctggcgggcaaattccgcttcattgacccctttttctaatgcaatttgaggtgtaatacctgtaatcatgacagcttctggttgtggcagataatcatcagcaggtgaacagtaaataactaatggctcttcaataatattgaaatccatatcagtacgaacaccagcaaattgagccggtctgtctaaggccggatgttgaccaaaagtttcgtagtcgtggatgtagaaagtgggttgttcgctgctatttttcactgttgttcaatgtccaaggttgttaattattttttatcgctttagtttggttttgatctgctttaatacccaaaaaagtggtaacttattatttagcgttaattcaggtctgatagtggctggttatttacacaggcgtctatcagattacaaagtcatactaggcgtatctgtaattttttaccgacagctgctgcatatttcttcaatgtattatacgaaggcccttgtgtgccagaagctagccggctttcaagccgtgtgatggctgttgctttggttcccatgcgttcagctacttgcgcttgtgttagcccggcctttttgcgtgcagctagcagttcatcaagcaatgcaaattcttgttccagtttctcgtattcagcttttacagccggatttgacaacatttttgcaaccatttcatcgtgtgtcatggttggaggggtatatttaccagtcattttttacctctttcattctgacttcggctttcctgcgttctttaagtggggtcttttgtgttttcttcacgaagctgtgcagcatcactatacggtgcccaatcattgtgcaatagaatacgcgagcaattccttcagcccctttgagtctgagttcaaacaacccattaccaaacgcttctgtgtgtggttctccgaggttggcaccatgttctcgcattctttcggaatacctgatgtaacgggcttgaagtgtgtcagggagagcaaggatctcgttctccacctcggtgctatagtaatagatagtatatttcatgaaccaaatataacaaaattgttatatttttgcaatactttgctaatgtgaagcaggtatatgtgactattccttgttctattgaattgcaccccaaaagttgggtgcccgattactgacttaaggcggtggttctatgaagaaaaatatcctgttgcctctagaattcaggttgctgagtatttcctgtcaggtactcttggcgctaaactgactgtaaaacattttggcattgatcatagtactattgtgtacatattttcttactttcatgttccatgagcggaagttagttattagttagcatttttgatgcctggaataaaagattgtatgttttaagaccattttcccttgaccatattgatatgtttgcatagatatgcagcgaaaggttgaaaatattaatatagtgaatatataaaatttaatttacttaaagattaatagccaaaattaagggttaatttctgttggttgtggtgtcggagatgcaattggcatcaagtcactaaatgggcaagaagatcaggttttcatttatagtatacaacatcgaggtttatttgatgagttcactgaaggattagataaatgatgatgaaaatcgtgatgcacataattcaagggataattggtgcggtgagtgtattttcagttatgggtttagtttattttacactgatgtcaacattggaaaatcgatatcagtatgcaatagttgcaggtatatgtttggtactttctgcgtttttttactatataacgtaaaaaataaaagaaaaatgcatattattccaataggttatgattagtaagcgtagggattattctttacctagatttacccaggaggattcgactaataagagtattttaggatgggctttcctattattaatggtattgtcaaaggtaatctataaatatattttactagtttgctgatgaattgtttagagagttttatcagcaaacaggatatataataattagaatatatttttatgcatatatttgtctttattaagggtaattaacctcttgaaaatgatcattaatagattcaatatattgatcatttaaaccagtttcatattgaattctttcaagtaaatttattctattgacactataaaatggtttaataaaaaccccatttttggggtgggttattcttataattggaattcttgttctacgtgcatgaccaaaaaaaatttcgtaaccatccaaatcaaaaggaatttttttcatcacctaacctaattatcgttatatttttcgtcaattttaattatgtttcagcaataaggaaatttttatcttattattaagatgggtatcacaaatatagtcattttgaacatatatttaaataataaactaataaactaataaactaataaactaataaactaataaactaataaactaataaactaataaactaataaactaataaactaataaactaataaactaataaactaataaactaataaactaataaactaataaactaataaactaataaactaataaactaataaactaataaactaataaactaataaactaataaactaataaactaataaactaataaactaataaactaataaactaataaactaataaactaataaactaataaactaataaactaataaactaataaactaataaactaaatgttttctctatttgatgtgaattttctttaaaaaaatcttctgaaaatcctattttacaaagagttgaaaagtaaaataatgaagacagtttaagatatatagaatgttggtggaatattaatattttattcaagattttatcatgttctatataattaattgtctttatttggtttgtctattagtgtctgatttaatttccaaatagaattagctttataatttttatttattttgcatgaaataatagttgaattattatcatatgcaaatatataaattttttctctgacagatatataattacgtttgttagataatcatggagatcatagtgattaatgatagtacatttgaaatctgaaaaaattgtagagtaagagatggaagatgaacgatagggaagggaaaatggtgcttctgccagtggaaggttggtgatttattattcattcgcattggccgattgttttcgattgagtcaatattatgaacctttagtaaaaagttaatagattcatacccaatggatttcaaaatgcatcgcgacggcaagggagtgaatccccgggagcatagataacgatgtgaccggggtgagcgagtgcagccaacaaagaggcaacttgaaagataacggatatatgtaattaatgagaatcaataaataacggaaactgacttgtctattaatggttttagtcttattgtgtagtcagattggataatttgtatgtttaaattgaagataaggtatgaaaatggataacgtaaataagccgtcattccacaatgtgctggagtttgtacgtatgtttcgtcgtaagaataagttgcagcgtgaaatcgcagataatgagaagaaaatacgcgataaccagaagcgtgttttattgcttgataacttgagcgaatacatcaaacctggtatgtcaattgaggatattcagagcatcattatgaatatgagaagtgattatgaagaccgtatagatgatcatataattaaaaatgcggatctttctaaagagcgtcgtgaattgtctaaaaagcttaaaacaatgggtgaactcaaatagcattattagataaccacgcacgaatgcgtggttattcttaccgactacgcaacagcccaatcaggtttaagctctggatcaactaaggtataaatctgctgatatgaagattcttcttctgccatagttgccagttgatgtgctacatcttggcgactagctgcaccatgaatttcatgctgatatctttgacaatggcctgttccgggtttatctgttaatcctcctggacgaataattgtgtaattcaaggagcttgtctgaaggtagttttctgccattgatttacgcctgacagattgaccaaacaatgatttaactctgggtgacagggttttccagctttcgccacaacctattgaggtaacgagtaacatacgtgttatttcagttttctcaatagtatcaatgatagtcatattgccaaagagatctgaatcaattccaccaatagtagaaaagacgattgcttctgaacttacatgttgtactgttttttcaacatcttcagcattacaggcatcaccttgtatcactttgacacccaaagcactcagttcagtagcctgctgaaaattgcggataagcgcaatgacgggacgtttttgttgcagtgcgacagtcacgagatgacgtccaatgccactacccgcaccaaaaataagccacggtttcataggttattctcctggttaaataagaaatcgaatgataattaattgaacagggtcacggtaatgactgctcaaactaacccttatgtggggagaataaaattaacggtgagtatttttgtggggttagtagcaaaaaaaatggctccctaaaaagagccattctgctaatattaaataatgttgtttattcaaagaattgcggtttagccattggtgaagtagccgcattagtggctgaatggccccccgctccgcctttcccttcaaaatgagaaaaaggtcgttgccattcgttgataacaataggtttttcaatcatctcaggggctggtgctttggtcattggcgcataagaatgatgaactttggctataatagcaacaggttgtttaaccatttcatctttactctcttcaataatcatcactgctgcaatttctttagaaataacaatgtcttcagaaacaacaacgtcttcagaaacaacaatgtcttcgtctgcttcagattgctgctcaaattcaggaataatcggtgttgttgcaaccagttcaataactgaccgctcttcctgcactggtttagtttgctgtagaacaatgtcattttgttctgtaattcctgttgcagatttgattccgttctggtgagctgctggcgtctctgctaccttcggagattcaataacggtttgttcagattctgcaacaacgatgattgcaggtactgtttctgctgctattaccggcaatacctcattttgttgttcttgctgttcgatcatggaaatttcctcaggcatttctatggaaatcggaaccaccggatagcgaacccaaactttaccggaagccatttctggtgatgcaacagccatagataatggtgccggtgattgaagtagatttctctcatcgcggtaacggcggcggcgctgaccactaacgcgcaaatggcgaggtgagcgacgagagcggcgtggcataacattatcttgttgctctttattttcagtcaattgttgcggctgagctgtttctagcggtatttcaacaggtactggtaattgctcttcggtaacaacaggtatgggcagcgaggcgacagttgtaacttctttcacttcatctatgatgcgaattttttgttcaagctgacgacgttggcgacgtggtataaccggtagacgttcttctacctcattttcaacaatttctggtttctgggtttcaggttgcagttggcgtttttcttcctgacgacggcgttgacgttctgcacgttgctcgcgacgttgctgctgttgggtttcacgagcagcagtgtctatcgtcacgttgttatcttgagtgccatttttctgttgagtatttcgatttttccgctgttcgtcacgatcacggttattacgttgttcatcacgcagattattatcatcacgatctttacgtgaattttggcggcgttgattgcgtcgttcagaagagcgacggttatcatgaccggataatttgttctcttttttctgtgccggtttttcttcttctgcttctgtactgaacatttttttcaaagcagtcaagaagcggcttaagagacccggttgttccgttatagtctgagcagtgtggtttggctttttctcttttgctttatgtgatggttgctgtgctggcgtatcggctggcaaagcaaaagcagaaatagcgggctgctcaggacgcttacgttcaggttgaacatcttcttgaggatttatcgcgccagcttcatgaaattgaggaagcagatagctcagtgcagaaatttcctcacctttacgcacacgtagaacagagaagtgaggagtctgcatttgatcgttaggcacgatcactacgccaacatctccctgacggcgctcaattgcactgactgcctggcgcttttcgttcagtagatatgaggcgatttgtactggaacaatagcatggacttgatgcgtgttctctttcagtgcctcttcttcaatcagacgcaaaatggatagcgacagggattcattgtcacgaatagtccctgtgccgctacagcgtgggcaaacgtggtggctggattcaccgagtgatggactcaggcgctgacgggacatttccagtagaccaaagcgggaaatacggccaatttgaatacgagcacgatcctgacgaacagcatcacgtagtcggttttccacttcacgttgatgacgtactggtgtcatatcgataaaatcgataacaatcaaaccaccaaggtcacgcaggcgtaattgacgggcaatttcatctgcggcttcaaggttggtattaaaagccgtctcttcgatatctcctccgcgtgttgctcgggaagagttaatatcgatcgcagttaatgcttctgtggtatcgataaccacagcaccgcctgatggcaggcgaacttcacgctgaaatgcagattcaatctgtgattcaatctgatagtggctgaacagaggaacctcaccactatacagcttaattttactggtgaaatctgggcggccaagtgcggtgatatgttgccgtgccagatcgagaaccttgggattgtcgattaagatttcaccgatgtctgggcgcaaatagtcgcggaaagcccggacgataacattgctttcttgatggattaagaagggagccgagcggttttcggcggcttttttgatcgcttcccagtgtttaaggcggaatgataaatcccactgtagtgcttctgcggacttaccaacgcccgcagtgcggacgatcagtcccattccttctggcacttctaacgatgccaacgcttctttcagttctgtgcggtcatctccttcgatacggcgggaaataccgcctgcgcgagggttattgggcatgagtaccagataactgcccgccagactgataaaagtggttaaggcggcccctttattaccacgttcttctttatcgacttgaacgataacttcctggccctcccttaaaacatctttgatattagggcgaccgtgaggatggtagttattgggaaaatattcgcgggctatttctttaataggaaggaaaccatgccgttcagcgccgtagtcaacaaaagcagcttccagactaggttcaattcgggtgattttacctttgtagatatttgcttttttctgctcgtgtcctgggctttcgatatccaaatcataaaggcgttgcccgtcaaccagagcaacacgcaactcttcttgctgagttgcgttgattagcattcttttcattgtaacttactcattattttttacattagttatagagctacgggcaaatatagatgagcgactggtaaccgatggtctcgtgtcttttacaaatccgccaacctcccggttgtcgtttgtatagagacgcatattttcggcaggtctgaattttcacttagaaaacagtacccttttctaggaataatctgcaaatataaatgaagctgatttgatccgattccagtaatctgctacccgtagcccgctaattatttgatttcccagtacgtcttacgccattgctgcgtttttgtgcaatcaaatgaagaacaaacgtttaacttcgccattcaggattaaaaaactgatggtggctacgtattattccattgctgttggggtgatagcaaggtgactttatgtctttaagcggtttttctgatgaaataggaagaaatagttaatatttaatctttatcttaaagtagcgaaggtaacaaccggaaagtatgcgtgatttttacacatatttaaaaatgagtagcactctgcttgagtgataattaaaattgctatcatgaaaacgaataatcaagttgtacaatttgtcactattgatgacgatgaagctggacagcgagttgataattttttattagcgcgtttgaagggtgttcctaagagcatgatttaccggattgtgcgtaagggggaagtgcggataaataaaggcaggataaaacctgagtataaattgtctgcgggggatgttgtcagaattccaccggttcgggttgcagaacggcaagcagtgccagtttcagctaaactggataaagtcgctgcattagacgattgtatcttatacgaagatgaccatattctagtgctcaataaacctgctggtacggccgttcatggcggtagcggtttaagttttggtgttattgagggattgcgggttttgcgtccggaagcaaaattcctcgaattagtgcatcgtttagatcgtgatacctctggaattttgttaattgctaaaaagcgctcagctttacgggccttgcacgagcaattacgccttaaacagatgcagaaagattatctggctttagtacgaggacaatggccatcacattgtaaggttgttcaggctccattgctgaaaaatatcctgcaaagtggtgagcggattgttaaagtaaacagtgaaggtaagccttctgaaacgcgttttaaagtagaagagcgttttgccaatgcaacgttagtgaaagccagtccggtaacgggtcggactcatcaaatccgtgttcatactcaatatgctgggcatccgatcgcttttgataatcgctatggggataaagtttttgattcgcaactgtcagctacgggtcttaaccgcctattcttgcatgccagtgtgataaaatttactcatccctcgacgggggagacattacgtcttgaagcaccgatggatgagcaattgcgctattgtataaacacgttacgtcagaatcacagtaattaacctatcgccgtcagtgggtttaccccctggcggattaataattcagtcaatgtaattaatggtaaaccgatgagcgtattcggatctttcccttcaagtcgttcaaataaagtgattcctaacccttcgcttttaaagcttccggcacaattaagcgggttttccgcggttaaataagcccggatttcatcatcagccagctctctaaaatagacattgaataattcacaacgggtatcggttattcctgttttgctgttaaagagagaaatgccggtataaaaggtgacgcaatgaccactggcttgccgcaattgtttaaatgcatgttcgaaactgtggggcttgccagtgatttcgccattaataacacaaacttgatcggaaccaataatcaaatgctgagaatattttgtttgtaatgcctgtgccttggcttgcgccaaacgcataacgagctgttctgcattttcattcattcgaggtgtttcatcagtattaggagctgcacatataaagggtaaacgaagtttttccagtaacatgcggcggtaagctgatgtggaagctaaaatgatttgtgtcataatttttccaaaagacatggcgaaataattgcaggcattttaaactaggcacagcttaataagcgaatatttggcggaaaggtgcagatgtgtggcctttttctttgactatatctcattacaaagataatatgcgcgccttatgcaaaaagtaaaattacccctgaccattgatgcgcttcgcgcagctcagaaacgattagactacgcaggtagttattcacctgagcaagttttgcgtatcgcggaatctgtggttagcgtggacaatgatgtagacagcgttttatcgtttcagatagataaccaacgtctggcggttgtgcgtgggcattccgatgtggatgttacgcttgaatgtcagcgttgtggcggtaatttcagccatcacgttcacataacatattgttttagcccggtcgtcaatgatgaacaggttgaagcattaccggaagagtatgagccaattgacgttaacgaatttggcgaaatagatttgctggcaatgattgaagatgaaataattctttctctgccggtggttccggtacatgattctgaacactgtgaagtgtccgaagcggacatggtgtttggtgaattacctctagaggctgaaaaaccaaacccatttgccgtattagccagcttaaagaaaagtacttaaggagtaaggtcaatggccgtacaacagaataaaccaactcgttctaaacgtggtatgcgtcgttctcatgatgcactgactgcaccattactatctgtagataaaacttctggtgaaactcacctgcgtcaccatgtgactgctgatggctactaccgtggccgcaaagtcatcaacaaataatctcgccagtcattagcaagttgataccttgactaatctgactttagcgttagatgctatgagcggggactttggtcctcgcgttacggtgcctgctgcattgcaggcactggcgtctaaccctagacttaaattattgctggtcggaatccccgatatcatttctccgatgcttgtaaatagtgatactgagttgctcagtcgtttacaattggttcctgctgaacgggttgtggctaatgatgcgaaaccgtcgcaagcgattcgtaacagccgaggaacatcaatgcgcattgctctggatttagtgaaatcaggtgaagcgcaggcgtgtatcagtgcaggaaataccggagtattgatggggttatctaaattgatgctaaaatcgatagaaggcattgaaagacctgctttgatgaccgtgttgccaaacctgaaacagcggcaaactgtcgtattggatttaggtgccaatgttaattgcgatagccgcatgttggtacaattcgccattatgggttcagtgatggccgaggaagtcgtgggggtggttaatcccgcggtggcgttgcttaacattggtacggaagagagtaaagggctggataatatccgcgaagccgccactattttaaagcgtattccgacgataaattacattggttatctggaaggtgatgaattactgacaggtaagagtgatgtattggtatgtgacggcttcgcaggtaacgtgacgttaaaaacgatggaaggggcgatcagagttatcttatccctgcttaaatcatcggatggacaaaagaaaaaattttcctggttgttgagaatagtcaagaagtggttgcaaaaacggatgacaaaacgcttcggtcacctgaaccctgaccagtataatggcgcatgtctgttaggattatatggaattgtaatcaaaagccatggggcggctaatgagcatgcgtttaaagccgcaatcgaacaggctgttcaggccgttgaaaggcaggttcctgatagaattgctgcacgcctggaaacagcattacccaagagtgactgaacatacatgtatacaaaaattttaggtacaggtagttatctgcctgcgcaagtgcgtactaatgctgatttagaaaaaatggtggatacttctgatgagtggattgttacccgtacaggtgtccgcgaacgtcgtcttgctactgatgatgaaactgttgcggttatggggttccgggctgcaaagaaagcaattgaaatgtcgggcattgataaagagcagattgatttaatcattgttgcaacagcttcatccacccatgctttccccagttctgcgtgccaaattcagcacatgttgggtacccaaaattcagcggcttttgatatttctgctgcttgttctggttttgtttatgcactgagtattgctgataagtttattaaaaccggtgtggcaaaacatgcattggttattggttctgattctattaccagaacacttgatccagaagatcgcggaacacttgtcctgtttggcgatggtgcaggtgctatggtggtaggggcttctgatgagccaggaattctttcaactcaccttcatgcaaacggtagctatggtgaattgctggtattgccttatcaggagcgtcagaatctaaaagagcccgcatatgctagtatgatcggtaatgaagtatttaagattgcagtccgtgaattggctaacatagttgatgagactttagaagcaaataacttaccatatagtgagttggattggctggtacctcatcaggctaatttgcgtattatcgcagcgacagctaaaaaattaaacatgacaatggataaagtagtggtaacgctagatcgttacggtaatacttctgcggcatcggtacccacagcatttgatgaagcagtacgtgatggccggattaagcgtggtcagttaatcttaattgaggcttttggtggtggccttacttggggttcggcactgatacgtttttaatttgacaggaagatgaacatgtctatgtctgaatttgcaatggtatttcctggtcagggttctcaagaccttggtatgttggccgatttggctacagcgttcccagttgtcgagcaaacttttgctgaagcgtctgatgtactgggatatgatctctgggctctggttcaacaggggccagaagaagaactgaataaaacatggcaaactcaacccgcgttgttggccgcatcggttgctatttggcgggtttggcaggaaaaaggtggaaaagcaccatcactgatggctggacatagccttggtgaatattctgcactggtttgtgcgggtgtcattgatttcaaacaagctattagacttgttgaactgcgtggcaaattgatgcaagaagctgtacctgaaggcactggtgcaatgtatgttattattggtttagataatgaatccattgatcgtgcttgtaaagaagtagctcaggggcaaattgtttctcctgttaactttaactcacctggtcaggttgttattgccggtgagaaagaggcggtagagcgtgctggagatgcatgtaaagccgcaggggcgaaacgtgcgctgcctttggcagtcagtgtaccgtcgcattgtgcactgatgaaacccgccgcagataagctggcagttgttttggaaggaattgaatttggctatcctcagttcccggtggtaaataatgttgatgtgaaaatagaacaatctgctgaagctatccgtcatgcactggtacgacaactctataaccctgttcgttggacagaaacagttgaatttattactgaacagggtgttggtcagctattagaaatagggccaggtagagttttgacaggtttaactaaacgaattgtcaataccttaagcgcagcagcagttaatgacacagcttcactaataactgcattggaaaataattgagggcaatatgagattagatggaaagattgcattagtaacaggcgctagccgtgggatcggccgtgcaactgctgagctattagcagagcgtggagcctatatcattggtacagcaacaagcgataaaggcgctgaagtcattagtgcttacctcggtgaaaaaggtaaaggttttgtactgaatgtcactgatccggaatcgattgaacagcttatgtctaccatccgaacagagcatggcgggcttgacattttagtgaacaatgcgggtatcaccggtgataatctggtgatgcgcataaaggatgatgagtggcagcatgttattgacactaatctttcatctgttttccgtatgacaaaagcggcaatgcgcttcatgataaaaaaacgttatggtcgtatcatctctattggttctgttgttggatcgatggggaacgctgggcaggcaagctatgcagcggcgaaagcagggcttgttggtttcagtaagacattggctcgcgaagtgatttcccgtggtattactgttaacgttgtcgcgccagggcttattgaaactgatatgctaagagcgttgccagaggagcagttggcgaacttttcgaatgatatccccgctaaacggcttggggatgtaaaagaaattgctagtgctgtggctttcttcgcttctgatgaagcggcttacatcacaggcgaaacattacatgtcaatggcggcatgtatatgaactaaaaaatgagcgaaccagttgcattttttgtgtcaaataacgcaaaatagagcaagtttgtggttcgaccagccgggattgggttgcatcttttcctgtattttataaactacgaaaaccatcgcgaaagcgaattttgataggaaatttaatagcatgagcactattgaagaacgcgttaaaaaaatcatcgttgaacaacttggtgttaaagaggaagaagttgttaattcagcttcttttgtagatgacttgggcgctgattctcttgacacagttgagctggtaatggctctggaagaagagttcgatatcgaaattccagatgaagaagcagaaaagatcactacagttcaggcagctattgattacgtccagaaccaaagcgaataagtgaacacacctaggcggtcattcgaccgcctatgtttctgccctaaataatttccctccttggaggataagcgtgtctaagcgtcgagtagttgtgaccggactaggcatgttatctcctgtcggtaatacagctgaatcttcttggaaagctgtttgtgccggacagagtggtatcagccttattgaccattttgacaccagtcaccatgcaactaagtttgctggtctggttaaaggttttaatcatgaagatttcaatatttcgcgcaaggatgcacgaaaaatggatgatttcattcaatatggtattgcagcaggtgtgcaagccattgaagattctggaattgaagtaacagaagccaatgctagtcgttttggtgctgctattggttctggtattggtggtttgggtctgattgaagaaaatcacggggcgttggtggcgagtggtcctcgtaagatcagcccgttcttcgtaccttctacgatcgtaaacatggtagcaggtcatctgagtattatttacggtttgcgtggcccaagtatttctatcgccacagcatgtacgtcaggtgtacataatattggtcatgctgcccgtattattgcttataatgatgctgacattatgctggccggtggtgcagaaaaagccagtactcctctgggggttggtggttttggtgctgcccgagctttatctacccgtaacggtaatccacaaggtgcaagtcgtccgtgggataaagaccgcgatggctttgttctgggggatggcgcaggtatcctggtactggaagagtatgagcatgcgaagagacgtggtgcgaaaatttacgcagaaatcgttggctttggcatgagcagcgatgcttatcatatgacgtcaccaccagaaaatggtgcaggtgctgcgttggcgatggaaaatgcgctgagagatgccggtatcactaccaagcaagtgggatatattaatgctcacggtacttcaacatctgctggcgacttagcagaagcgcatgcagttgagtccgtgtttggtgaaggcactgatgttttagtgagctccactaaatcaatgacgggtcatttgttgggcgctgcgggggccgttgaatctattttcactatcctggcattgcgtgatcaagttgttccgccgactatcaacctggaaaatcaggatgagaactgccgtctggatttcgtgccaaatgagtcccgtaaggtagaggggatggaatatgcattgtgtaactctttcggcttcggtggtactaacggctcactgattttccgtaagattaaacctgattaacaggtagagcctgatattacagaaaaatacggttgagttccgcttagtatacccaatggatttcaagatggatcgcgacggcaagggagcgaatccccgggagcatagataacgatgtgaccggggtgagagagtgcagccaacaaagaggcaacttgaaagataacgggtatatgattttgtaaatactttaaggcgatagtatagagagctccaatagttaataattattggagctttttttgtggcaagaatcatggacatttttgcactcgtatcagcgatatactatgataccgcttgttgataaattgcattgaaatgccttttttgagtaattaagaacaaaattatatgtattggattaatggggagcggtgcgactatttacctgccaatgatcgttcagttcaatttggtgatggttgcttcacaacagcaaaaatagaacaggggcaggttgctttgttgtcgctgcatatccaaagattacaaaaaggcgttgaaaggttatatcttccacaacccgattggcaacggcttgaaagccatataagacagattgcttccacgactgaacaaggtgtacttaaagttattatttcccgtggaaccggaggacgtggctatagtgctcaggggtttacgcaacctaatcagatcttgtctctgagtccttatcccgacaaatatttgaaacagcgtcagaaaggtttatctatggtgctcagtccggtagcgatgggaataaacccctatcttgctggaattaaacaccttaaccgattagaacagatattgattaaaacatttatcgaaaaatcgaatgctgatgaagctctggtacttgatactgatggcttgctggttgaatgctgtactgcaaacattttctggcgtaaaggaaaaggtgtgtatactcctgatttacgaggttgtggtgtcgaaggtgtgatgcgggaaagaataatcgcgttattatcggaaagcgattatcacttttcttgtgtaagctgttatcccgaaacattggctgatgcagatgaagtgatagtttgtaattctttaatgccggtgatagctgtcaaagaaattcaagctcatgaaaatcagcccagatggcaatatcagtcaagggaactgtatgaatatttgcttcctgaatgtttgaagttgtaattcacgatgcatttaagtgaaccgtgtgtttcagtgaactgtgtttaagtgattagattaattgatgaaatggaaaaaacgcctttttgccctattggctttgattgtcattacggcagcaatattactctatgctggctatgaaaaagttgaaaaatttgcggatcaaacattaacaattaaacagaatcgaatatttaccctgccaacaggtattggtcgtcatggtttggaagcgttactggttcgggataacctgattgaagatagtcatattttcccttggttattaagattggagccaaaacttgccgagttcaaagcgggaacttaccaattaacacgagaaatgactttacgggaaatgttgcaattattctctagtggtaaagaagcgcaatttacggtccgttttgttgaaggtagccgtttatctgattggtggagaatactacagcaatctgaatatcttaaacatgaattggataataaagatgctcaggaattggctgaaatactcgatattaaagatacagatactctggaagggtggctttatcctgatacctatcactatacggcaggcacaagcgatgtagcattgctgaaacgagcatatcgacagatgaaaatgacgctggaagaggaatgggaaggtcgcgacaaaaatctgccctataagaatgcttatgaaatgttgattatggcgtcgattattgaaaaagaaactggtgttgaggctgagcggacaaaagttgcttctgtatttattaatcgtttacggttgaatatgcgacttcaaactgatccgacagtgatttatggtttaggtgaaaaatatacaggcactatttttcgtaaagatttaacaacattgacgccctacaatacttatatgattaatggtctgccacctacaccgattgcaatgcctggccttgcttctataaaagcggctgcacacccggcaaaaaccgaatttctctattttgtggcgaatggcaaaggtggtcatacttttacgaccaatctggctgcgcataacaaggcggtaaatatttaccgtcagaggttaaaataggacaaatgaacagcaaatttattgttattgaagggctggaaggtgcaggaaaaacgtcagcaatgaaaacaattgttgaaatgttgcagcagcacggtattcagaatttaatttttacccgtgaaccgggtggaacacctctggcagaaaaattacgtgggttaattaaacaaggtgttgaaggtgaacctctgacggataaagcagaggtgttaatgttatatgcagccagagttcaattagtcgaaaatgtgattaaacctgctttggcccgcggtacatgggttgtgggtgatcgtcatgacctctcttcccaggcatatcaaggagggggacgtggtattgataaaaacttgatgacttcactacgtgatactgtgctgggtgattttcgtcctgacctgactatttatctcgatcttcctcctcaaattggtttactgcgtgcccgtgaacgtggagagttagaccgaattgaaaaagaatcgatggatttttttgatcgtacgcgcagccgttacctggagtttgcagcacaagataagagtattgtgaccgttgatgcagctcaaccaatagagcaagtacaagcagatatttatcaggtacttgagcaatggctaaagcagcaggaaaatggctaatgaattggtatccttggcttaatcaggcatatcgtcagttggtggaatctcatcagcaagggcgaggccatcatgctttattggttcatgctaatgcaggtactggggccgatgtgttgatctatggattaagccgatggttaatgtgtcggaatagacaggggatgaaaagttgtgggaagtgtcatagttgtcacctgatgatggcaggaactcatcctgattggcatattatgtcgccggagaagggcaaaaccagtgttggtgtggaagcggtacggcaaattacggaaaagctctatagccgttctcagcaaggtggggtaaaaattgtttggttacctttgaccgaatgtctgaccgatgctgctgccaatgcattattaaaaacgttggaagagccaccgaaacatacctattttcttttggaatgtcggcagccgtccagtcttttggctactttacgcagccgctgtttttactattttctgccggtacctaagacggaaagtagcctttactggttgcaaaaacagttgcctttaatttcttcggtcgatgcaatgaccgcgttgaaactgtctcagggagcgcctgtagcagcagaacaattgttgcaaccggagcaatggcagatacgggagcagttttgccaggctgttaaacaggctttggataaacatgatgctttgtcacttttaccccaactgaatcatgaaaatgcgccacaacgccttcattggcttatcagtttgttatttgatgcggtgaagtggcaacagcagttacagcgttattgtatcaatcaggatcaacaaacgctgatttatcaattgagttccatgcataccctggctgttttacttcaaggcgttgatgactggatgtcttgtcgtcatcagttgctttcagtcgtgggcgtaaattgggaattgttactggtagaacagttgctcaattgggaaaaacagtttacttcatcaccctgaaatctttttgtatacgagtttaaatatgttgttagttgattcgcattgtcatctcgattgtctcgattatgaaaacctacataaaaatgtagatgatgttgttgcaaaagcggcagatcgggaggttaaatttatgctggcagtagcaacgacgctacctggtttccagcaaatgaaaaccttaattggtgaacgggaaaatatcgtattttcctgtggtattcatccacttaacttggatgaaggttataattttgatgagttggcgcgtttagcttccgggaatgaagttgttgcactaggtgaaactgggctggattactattatcaacaggataatgctgaattacagcgaacctcatttcgtgaacatatccgtatcgggtgcaaactcaacaagcctgttatcgttcatacccgtagtgctcgtgatgatactttgagggtattacgagaagaacaggcacgagaatgtggtggtgttttgcactgttttaccgaagataaagataccgctagagaattactggatttaggcttctatatttcattctctggtattgttactttccgtaatgcggagcagattcgtgaagcggcaagatatgtaccgttggatcgtattctgattgaaaccgattctccttatcttgcacctgtgcctcatcgtggtaaagaaaaccagcctgcctatgtgcgtgatgttgcggaatatatggctgtacttaagggagtgagtattgaggcattggcagaagtgaccacacagaatttttgcgatttatttcatgttgatgtagacaaaatttgatttatcaacttgaatctttggtttgtaagcgctcatatatctgttgttttttgaataaaaggaaaatgtgatgatagaagaaactattttcagtaaaattattcgccgtgaaataccttctgatattgtttaccaggacgatctagtcactgcattccgcgatatttctccacaggccccgactcatattttgattattcctaatgttctgatcccaaccatgaacgatgttaaaccggagcatgaagcagcattaggtcggatgatgacggttgcagcaaaaattgctgaacaagaaggcattgctgaagatggatatcgtttgattatgaactgtaatcgccatgcggggcaggaggtttatcatattcatatgcatttggttggtggtcgctatttagggccattgttgatgaagtcaatatgaagtactgaaattcatggacatcggcagatattcggggggatgtttattctaaactggctccgaatatctcgattttgtaatataccctatggatttcaagatacatcgcgacggcaagggagcgaatccctgggagcatagataacgatgtgaccggggtgagggagtgcagccaacaaagaggcaacttgaaagataacgggtataaatgctgcaaatttatcattggagttgaaccgataatatgttgctggtgtcacagcaaaaacttatctgttttttaaaactctgtaattggaataggttgatgagaagaattctttttgtagcactatcggttatgtttttggcgggatgtccatccttgccaccggagcagcctgaacctccgactccggttgtaccagtgaccccatcggaaaaaccgacaccaccatctgaaaaggtaccagagcctcctaaaatgagtgcgattgactgggaaagtaccgtgcaaccattagtagagcaactcgttaaggctcatgggttggaaaacgcgaagttactattagttgatacagtgaaaaacaatactaacggcgcattacaaaccatgcaagcaaccgatgctttgcgtcaagctatcagtagcgagcatgtttttgaattaataccccaaaatcaggtgcaaaatgcccgtcaatctctgggcttatctgaagaagatagtttgggattgcgcagtaaagcgattggtctggctcgttatttgaatgcggaatatgttctctattccatagtttcaggtaatagcgataagcgtgatatcgtcatgcaattgatgctggtaaagacgggcgagattctttggtcggggcacggtgacgttaaataatcataattgtttattgcgggcattgtgcaaacaatggccgcataccgcagtaaatgattggaagataagaccgttaagtgggctgacgaatgagagttattatgccaccaatggtgaatatcatattgttggccgcaggcaggggcagcaggggaaacagcttggcgttaatcgtcagcgtgaaaatgccattctgcgccatctcagccaggtaaaaattgctccgcaagtcatagcaatggttcctcactggctgttgttggaatggctgcccggccatattattgggcaaaatgagttttctcagcctgatttgttgcaaaaactggcggcattattggctattttgcatcaccagcctctgtttggttaccggcttcaattgaggcatcagctagaaagccattggttgcaaattgataaagcgcgtcttactccctgttggttgcggctgcataaacgttttatgtcgtctccgatgccttcaatactaaaattatcacccgctcatatggatgtgcattacggtaatttgcttaatacctctcaagggctgaaacttattgattgggaatatgcaactgatactgatattggatttgcgttagcggcactgtttcgcactaatcattgggatgagccgcagcagcaggattttttgaattactattgtagccagtcatcaggatattcaaaccggacactattagaacgccaaattaaacgttggctaccttgggttgattacatgattttaatgtggtttgaagtgcgttggaaacagagtggtgatccacaatttttagaattagcgcaaccgttacgtctctcttttggtctaacgttttaagctgcattgattgcagtaatatgaatatatacccaatggatttcaaaatggatcgcgacggcaagggagcgcagccaacaaagaggcaacttgaaagataacgggtataagcgaggaatgttatgggtccggttatgttagatgttgttggttatgaattggataatgaagaaaaggaaattttgcaacatccattagtgggcggattaattctgtttacccgcaatttctatgatgttgagcaattaagagaattagtccgtcagattcgtaaggcttctcgtcatcgtcttgtgattgctgttgatcaagaagggggcagagttcagcgtttccgcgaaggtttcacttgcttaccggcggcccaatcttttgctggattgagtgacaatctcaatggtactcaattggcggaagaggcgggctggttgatggcgtctgaaatgattgctatggatatcgatatcagctttgcgccggttttggatttaggtcaccagtgtgcggctattggtgagcgttcattccatgaagaccctgaacaagccaagatgatggcagagcattttatcaaaggcatgcattctgccggaatgaaatcgacaggtaaacattttccggggcatggtgctgttaatgctgattctcataaagaaactccctgtgacgatcgcccgttggaagttatttgtcatcatgatatgtctattttccgtgattttatccagcgtaatttattggatgcgattatgccggctcatgtgatctatcctcaggtagataagcatcccgccagcggatcgtcatactggttaaaatcagtgttgcgtcagcaattgggctttaatggcgtgatattttccgatgatctctctatggagggagccgcgatgatgggaagttacgttgaacgcgggcagactgcactcaatgcaggttgtgacatgattttgatatgtaataaccgtgatggcgcggttagcgcgcttgataatctgccgttgaccaaagtggaaaaattatcagaattgtaccatcgaggtggtcaatacagtctgaatgagttaaagaattcagaacgttggcagcaggctaataaagcactaacggctttgtatgaacaatggcaggattgcgcacggtaatttgtaaagtgtttgtgttactgccaaatagatgacctttagcgttaattgtgcgggaaaatatcccgcttttttgtatacatagcatggtcacattcctgaaatttctttgatatcaggctctttaatgcctcttttttgaggcatattttattttctatgtaaataagaaaatgaaataaatcagagctgaatccaaccaactgaaaataaattgacaaattttgtgattgatgtttatttattcaaaagaatttgatgttgttcaattttggtatgacccactaaccagtcatgatattctgtaattatcacatcggttatttgtataaaactaaatgttatttaaaggtattattttactgcccttaaataacatttggtttacattttagtggggtagtcatgacaacaccaaagaagagaattgttatcattggtggaggtgccggtggtttggaactggcaaccagtctggggcataagttaggtcgtaaaaagaaagcagaaattgtgctggtggatcgtaaccaaagtcatttatggaagccgttattacatgaagtggcaacaggctcccttgacgatggagttgatgcgttgagttatctggctcatgcccgtaaccactatttcagtttccaattaggggcattgactgatattcaccgtgatagcaaaaaaattactttgaatgagatcagggatgaatataacgaagtattggttcctgaacgtgaattgagctatgacattctcgttatggccttgggaagtacatctaatgattttaatacacaaggtgtgaaagagcactgtatcttcctggataacccacaacaggctcaccgtttccataatgaaatgttgaatctatttcttaaatattctgcaaactgtggtcagcaagataaggttaatattgctatcgttggcggtggagcgacaggtgttgagttatcagcggaattgcacaatgcggtaaaacagcttaacagttatggttttgaagggctgaattcagaagcgttgaacgtgacgttagtcgaagcaggggagcgaattttgcctgcattgccggcacgtatttctgctgcggcacatcaggaactcacaaaacttggcgttcatgtattaaccaaaactatggtgaccagcgctgatgaacatgggttgaatactaaagaaggtgagctgattaaagctgatctcatggtatgggctgccggtattaaagcacctgattttatgaaagatattgccggtcttgaaactaaccggattaatcagctagtggtaaagccaactctgcaaacgacacttgatgatcatatttttgccattggtgattgtgcatcatgctcgaagaaggaggggggttttgttccaccaagggcacaggcggctcatcaaatggctagccgctgttacagtaatattattgccttgttgcatgataaaccgttaaaagagtatacctacaaagatcatggctcattggtatcattgtctaaatttagtacggtgggtagtttgatgggcaatttgatgcgtggttcaatgatgatcgaagggcgtatagcccgtgcggtttatatctctttatatcgtatgcatcaggtggctttacatggttatattaaaactggcttgatgatgcttgttggcggaattaaccgtgttatccgtccgcgattgaaactacattaatgatttaattgatataaggccacccgtagaataacaggtggccctgataaagcatcactactttaatctgaaatcatttaccttaattaagaaaacaggcgatcaactaatttgaaagcatttgcgacatttggtcgcgtgccgactccttgtagttcacctattgtaaaaccactacttctaaccagtgttgctatttgagtgcaattaagatatttatgatattttaattttatataggactgaataagcgctaatgcacctgagactaaaggtgtcgcactggatgttccattataactgcgcgtataatttctcttatttcctggtaggtactgtaagtttgtatatccagtcgttgtgacattctcaccccaggaatttaaactggtgtgaagattatgattggaaaaacctaacctgtgtccattaattgatgtacaggcaccaatcataataccgccaggatcgccataattagggaaagtgaagtcataggctaaattaataccactattaccagaagcgaaaataattattgcccctgcatcagcacaactttttattctttgccaattagatttgagataggtaaaaggataatatctattattggctacagtttgaatatttaaactaataatatctcccggtaaaaagctatatattattctatcaaagtcatcgacgtcataaaaacggaattgacattcgtgagcaatacctgtcacaccgaatgtattatcttttgcagcaatacagccggtggcggctgtgccgtgattacaatcttgtgtttctgggcggctgttgataaccgtaatattaccaactaaatcttcatggtttctataaacaccaaaatcaagatggtgtacagtgacacctttgcctttataaccttcatcccaggcttttctaatattcataccgctgtgttcgtctaaatatccttgtagatgtgaaaaatcaggtgtaacgatatgagtagtatcaaattcaggaattatcgtttcctcttcggatagaagcaaaggtggcggcggcagctctttcaaaatcggcataagagagcaaaattcgacataatccagtttctccagttcattggctaacttgactaaatcagcatgattaatatcagcatctatcttgtaaagatgaattaatttactgaattctggtgttttccaggttttcttatctaaatcttcttgattaaaaacaggttttatctctattgaatgttgagatgaattaaaagcaggtaataaattatctttttctatttcaaatttttttaatccatcaggggaaaacataatctcaaggttatatttcaaattcttatttgggatatcattgtttccttttaaagaaacagtatttcctttggaaggtatctgtttcgatggtatatggttaatgttgatattatcagttttgtctttatctatctcatcgatttttttatcgatatcaaacagaaagtctgattcttttatttctatatcttctggtgtaagcgtagcaattattttaccgtcttttttaatggttgcttctattttataatttgcgggtttaagtgaagtcaaacagacgagttgattatcttcactataacattcatatatctcttttgtttttgaattggttacggtgtattttatttctgtatcgttactaatttcaccgtgacatttaagatataaattaccgtcaaattttgcagattgaaaatactcaagggatatggacattgtcattctcctctttggttaattacctcttgagtataactataatttggtatctcatattattattatttctcagtccattgttctgttagagagttactggattatttatactgattattactgaatgtgatttataaattaatttataatcgctttggtgaggaagttatttttcttaaaataaaaagtgggtttttattaaggtgggtaagtttgaatgaccttagtaatagagtgggatatattcgcataatcaagcgcaacatcgttactctgtaagtaaacatattcgtattcctttaaataattcattgaatattttaccaccccaagtttttcaagggcgattacttaatcggtttacccaaaaatctatttcctgcgcagggacttcattaaaattggtttcctttggaaagcactgcttgattaacccattgatattttcattgatccctttttctcaaggtgagtaaagtctttaaagaaactttccaattacagagaatgacgccaacaaatcatgctatttatcccatataattatgaagaatttagattaagtgatcttttggtagatcgagtggcaggtaaaaagcaaggctggcatagataaatccgcactagagatctttgtctccttaggattcatgagctaaacagttcgataatcgtttagataacttctttgacattcatccagagtttgtatctaagatcgttattgtgaacgatagtcgttcatgtattgataaaattaaaaaacacctaatgtaacgtgaataaactagttttataactctatctcagtaaggtgatccctgagtagttgaaaagcatcagtattgttattctgttggttgaaaaggtgcttatctccttcaattaattgactgtagaactgcccaccatctgttacttttaatatttgccaaagatcagaccagcttgtctcattactgcgctctaaaggagagagagaaatagataaccctcttgtagtgcctgaaaaaaagactaccttattattttctgttctgagcgccaagtgattgatgaaataacactcacggttacctttttctgctaataggttaataattccctgaacgcctaatgaagataaaatgtatttagtatacagcgaggggaaaccattaagagcatttatatggaaggtgctgtcctcaataaaaacataggaagaagggacgtgtggaacctgatttaatttaaatagtaggttttcttgaggatcattagtttgtaactctttaaagtcgaagcttttatgaaccaagtttatgtcagcatgactggaaaaaatagattcggcataagtgtatttctttgagttagacgtgtaaaaataaaggttcataatcaagtcacaatttcatctattttatgtttggcatgaaaaccatttaatccaacagagagcgacaataagcgctcactcgcaggcagttaagtttctcagtttattccttttcagcatattatagtgcacttaaaaggtcaagccagtacgcgaattgttgccaattcgaatttataaaataacgtattagaataggcttaattatctgggaggtttcaggtttgagactcaccctgatggaatggaaggaaatggataaaatcggtaatcatattagataatatcagtttgtataaaaaacaagcttaatgtggggtattttccgttttccaagcgaacccagaatagaaccaaaagactcattgaaattttttgaaaactcaattccaagctccaaaaattatgataataaagaagttaggttctctaagggtgaaaaaggtaatattcatcggttcgaagaaactaatgggaagtatcactggaatagaagtaccagtgatgtaaagaatccgttgaataaaaatgacattcctaatgttttattttcttttcaggaaaataagacattgtttgaaaaggaactaattaattagtgtgggagccaacaccggtattcaatattttgctaatagcagtgttgatctcaatgatatcgtttttgtgcactgggctggcgtattaacggccaattctggtcagtaggcacaatactttggaatgtgacctgtagggctggctcaagctatgtaaaatgtgatggttcaaagaatggttgagtaaaatttttctttattaaaaacattatatggatattggttatatttttatgaatataactatttctttattatcagatggttgtgtcggatttttatagatgaaatgtttctttttttacttggagatgtaaataaggctattaaaaataggggtatttatcgggataataaattattgggaaggattcgactaataaatacaatttttcatagggatggatcgtttgactcccaatatatgataatgggagtcaaaataatcatctttctagtccttcggttatataataatactatgatcttaacgcctgattattaaatgctggattagattgaatatggattctctgtaaatgccgttctgatttggaagtaaatccttcacggccatgtagcagagagaaattatccacaatcaccagatcactttttttccatgcatgagcatataaatggcgcttatcatataatatattgataaaatcttgttgaaattctgctacttgatcggggttgatattatgatattcaatagcatgtttatttaggaatttttctccatctactgccggttcgttatatctgataacgaatccatttctgtccggatgttcttccactaaaggagagtgaacttccccgccataatgagtgactttattaatgcgataagtaatcgatatattcttccactgttctaattgctgttgagtagcattagcaacaacacggcgagtattgacaaaggttgtcctgcccccttgatcgctttcaggtgcgtgggcgcaatggaacataataaattcgggaattgttggtttgtacatgccatcccagtgcaacggcatatagctattatcaaaaacgtgatcggtagcatcttggtgttcacgaacatctaaaatagcaccaaacggccacatcattatttctccccaattacgggcatatttttcatatttttcgtgatcagataaatcagatttaaaaccacgtaatataagcagatggtgttttcttgccagttctttcagttgttccactggtaatgtatcaatatgttgatcggaatattgaggcgtaatttttaaaccaaaaggggttatttcttctgtctgaaagctatttaattctgtcatgctattttccttcaaattacatagtgactgggttttccatgaatatttactaattttccgcccatcatctgaacttctttgtgtttcataagtataaattgcccatttacattggctgcgacaccatgccaaggggttaaccaatcatcccgggttggcatcatatgaataccaaatttaatactgtctgctggttgaggatgaatagacagacgtatggcttttgggaaatgagtatctaataaacttccccatgcccaacttcgttgaataacaccgatagctctttgtttggcatctttctgtagggcattgtttgatccggtgtaaccaggtaataagctgtcttcatataaaaagcgggtgactgcacggtataattgtaatccgttattattttgcaacagttcgtctttgatagatgcctctgagcgggcataatgttttactaacatctgtctctgtaaattaaaatcatcactatgttcgcagagttccttatcgtcattgaggttaaatgtacttaaattgatagcacccacttcatgaagtaattgtttaatatcttcatggtattggctgataacttcatcactgacatgaatgagatcaccgaaaacatgtccatcagaacaaataataatgcgagcaccaggaggataataaagctggatacgttggcaaaaagaattaagaaaaatcaaagataagcgttctgccatatcaggggcagtaccaagtactttatttatgtttggtgacttggttgggaatgccggtagaatgaattcgataggctttttattcttgataaagtattcaattctgggtaattgtacagttttaataatctcttcttctttagctgaatttttcactggatcagtaaggtgcctgcgatattgcaacaattcgcgcagaatttgcatagaaatattattcaaggaaacattctcggatgtaatattgttagcggtgacactttgcataattatggtttctcgtgcttgttgtaaatatatttattatttaatttcttaaaaatagataaatagagatttagttaactggtatagacgaagtgtaagataacgcaattaaaagataatataatatttaagaatatctaataatctattttgtaataagcaatatgtttgaatgtaatttatatagttaatcaatatatttgattgattgttacattaaggcaaagtttgacggggttattaagataccaaaaaactggtacgatcactttcattgagtgctgattaaggataaatgggcgtatgtagatggataattcatcttcttcttttctagaatatattgttgttaattatatgaaatgattattgtataatgaaaaattattattacaacaggagagatatcattcagataaaaaataaatttttgtatcagattaataatacaggctgttattactattgtacccgttatctttcaagttgcttctttgttggctgcactcactcacaccggtcacatagtttgctatgcttgttatcttagaataaatattgatgaataaatcacagcataattattcaatagtgcagatgaagatgagtcttgattttgacagatttacgtggaagagacagatagctgtacagtgtgaattaaatcacagtacttccccacagactgatgatcaatcataggggaagtgaaaatgacttaagagcagatctgatgatgttcaaaagtatcaagtaattgctgaatgaattccaggcgtgccgttctttcgttcagatcaatgatgaatttaagtttagcggggccatccaaccgataaatttcaggttgtttttgtaacaggccgatcagataagttggatcaactttatttttttcactaaactcaatgaaccctcccttttcatgggcttctattcgtttaatacctaatttctgagctaacaggcgaatggctgctgagtgtaataagtgacgccccggatcaggtaatgtgccgaaccggtctatcaattcaaccttcaattctgctaattctgatgcgtctttggcgctggcaatacgtttataaaaagacaaacgcatattgacatcaggaatataatcatcaggtaacaaaataggcatccgcaattcaacgtcagtttgactattggtcaagtcttcaagtgagggtttgcggcctgcttttagtgcatcgacagcactttctaacagctccatgtagagagtgaagccgattgttgtcatctgaccgctttgttcttcacctaggagttcgccggctccacggatttcaagatcgtgagttgccagtgcaaaacccgcccctaaatcttcaagggaggcgatggcttccagacgtttgtgtgcgtcggttgtcattgctttcggatgtggtgtcagcaggtaagcataagcctgatggtgagaacgtccgacacgcccccgcaattggtgcagttgggccaggccaaaatggtcagcacgttcaataatgatggtattggcgcttggaatatcgatgcctgtctcaataattgtggtacaaatcagaacattaaatcgttgatgatggaaatcggtcatcacccgttccaaatcccgttcacgcatctgcccatgaccaatggcgatccgtgcttctggtactaattcttcaagacgcagcttcgctttctcaatattttcaacatcattatagaggtagtagacttgaccaccgcgcaaaacttcacgcagtatggcttctcgcaccagcaaactgtcatattcgcgcacgaaggttttgactgccagacggcgagcgggcggggtcgaaataattgagagatcccgcatactactcattgccatattgagcgttcgtggaataggggttgcggtgagggtcagaatatcgacatcggcacgcatggctttgatctgctctttgtggcgaacaccaaaccgatgctcttcatccacaattaacaaacccaggtctttccagcgcaagtcgctttgtagcaacttatgcgtaccaataataatatcgactttaccttcggctgccatttcaacgatttgttgctgttccttggcgctgcggaaacgggatatcatctcaatacgtacaggccaattagcaaaacggtcgcggaaattatcaaaatgttgctgagccaacagggttgtcggaaccaggaccgccacctgcttgtcattatggactgccagaaatgcggagcgcattgcaacttcggttttgccaaagcctacatcaccgcaaattaagcgatccatcgcgattggctgacacatatcattcagaactgcgttaattgcctgttcctgatctggcgttgtttcaaatggaaagctttgacagaacaattggtattgttcccaatcatgtttaaacgcaaatcctggttttacggcgcggtgagcataaatgtcaagcaactccgcagcgacatcgcgtactttttcggcagctttctggcgggctttgttccatgcctctccgcccaatttatgtaatggggcattttcatcagcaccccctgcgtagcggctgatcaaatgcagggaagagaccggaacataaagtttgtcgttaccggcataacttaagatcagatattcagctttgataccacctgcttccagcgtagttagcccctggtaacgaccaacgccatgttccaaatggaccactggctgactggggcgtaattctgcaaggttacggatcagggtatcggtattaatcgtgcgacgggtatcttgacggcggcggacaacacgttcaccaagcatgtcgctttcacagattagagccagttcattctttgtatcgataaaaccatgttcagcggcaccaatcatcaaaaagtgacctggctgttgtgcttgatgcaatttgctgattttaatgggtttaatctttattcgtgacaataattcctgtaacgtttctttccgtccttcgctctcaacagagaaaataacgcggccactgaattgttcaaggaatcggcgaagcttatccagaggtgccttattttgcgcaacaacggagagatcaggcagcagttgataatcaagatttacgtgactcgcttttttgctcaattcctctgttttaagttgaatgcggggccagttttttagcgctgagaataaattgtcagccggaagccaaagctcttctgggggtaagagagggcgcattgggtcaattttacggctctcaaagcgttgttggatgtcttgccaaaaacgttcggcggaatggtttatttcttgactgataagcaaagtgttgtcgggtagataatcaaacaatgaaggcaagggttggttaaaaaacaacggttgccagtattctatcccggccggtaacgtgcctttactgacttgctgataaatatgctcattgtcacgacggacttcaaaacgttcccgccactggctgcgaaacagttcaattgtctctttatcggttgggaattcatgagcaggcagtaggttgatttgtttaacttcagtcagcgtgcgttggctgtcaacatcgaaaatgcgtaagctgtcgatttcatcatcgaaaaaatcaatacgatagggatgctcacttcccatagggaaaagatcaagtagtgcgccacgagtagcgaattcgccgtgttcaagaacttgttcgacactacgatagccagcctgttctaattcagtacggagtttatcccgtgagagtctctgatctttgtgcataacgagtgcatgcccgttaaggtactcatgagggcaaacccgttgcattaaggtatttatcggcaggattaaaacacctttggtcatcgtcggcagacggtaaagtgtagacagacggttggaaatgatctcctgatgaggagaaaaactgtcatacggcagtgtttcccaatcggaaaggagatcaacggagcagtcggtaaactgatggatttcatcatgcagacgtaaggcgttttgcatatccttggttatcagtacgacagggccttgatggcgttcgataatttcagcacactctaccgcgcaagcggcaccagtaagttggcctaattgacggttatcaccgcgacgttcgggaagttcataacgatattttgaggacataggcgtcaatgtgttctctatgattcagtccattcccaacaggctttcgacacataatggtcttcaagtaaacacgctggcgggttgagagaaaataaaaaaaccacagaatctggatgttggtggttccataaaatataactaccctttattatccccgaacactttgctttggcaacaggggcgtaacagatttcatgtttcaatctgtctcattatttataggtttgcggtatatgcgtggtcgggcggctgataaatttggtcggtttgtttcctggctgtcaaccattggcattactctcggtgttgccgcattaattacagtattgtctgtgatgaatggttttgagcgttcactggaaaccagtattcttggcttgatgccacaggcggttgtgacgtcggtaaacggctcgctagacccaaaagcgcatcctgccagtgaacttgcggctctcaagcaggttgacaggatgacgccattggtgatgggggatgttgtattgcaaagcgcccggaatgtcggtgttggtgtgatgctgggtatcgcttttgatgaatatgagccgctgactgaatatttaaccggcgcttatcgtcatcaacttgaacccggtagctacaatgctattttgggcgaaaaactggctggggagcttggggtaaaacgcggtgatcgcattcgcctgatggtgcctggtgcaagtcagttgacaccaatggggcgtattcctagtcagcgtctatttactgttattggcacttttgcgtctaatagcgaagtcgatggcacacagattctggttaatcagcaagatgcagctcgtctgatgcgctatccaccaggtcacatcactggctggcgtctctatctctcagaaccattggctgtagatagtttgagcttacaaaccatgccggaagggttgttatggaaagattggcgcgaacgtaaaggtgagtttttccaagcggtcaggatggaaaaaaatatgatgggcttattgttaagcctgattattgccgtggctgcgttcaatatcatcacttcgcttggtttactggtcatggaaaaacagggagaagtggcgattttgcagacacagggactggtacgtcgtcaggttatggcgatttttatgatccagggagccggagccgggatcatcggcactttactgggaactgggcttggtgttctgctttccagtcagcttaataacttaatgccactgattggcttattgacctcaggtgttgagctgcctgttgccattgagccgctacaggttgctacaatcgcaatttcagcgatggcgattgctctattgtctacgttatatccttcctggcgtgctgctgccattcaacctgctgaggctttgcgttatgaataatcaaccactattgttgtgtaataatctgtgtaaaaaataccaggaagggcaagtactgaccgaagtgctgaaaaatgtcacttttgctatcaatcagagtgaaatgatggcgattgtgggaagttccggttcaggtaagagtacgcttctgcatttgcttggtgggttggatacaccgacttctggtgaagtcctttttaaagggcactctttgaataaaatgtcctccggagccagagcagaactgcgaaatcatgaattgggctttatttatcagtttcaccatctgttgccagattttaatgcggtagagaatgtcgctatgccactgttaattggtggtaaaaatcgcggtcaggcacagaagaaagcattcgaaatgctggcggctgttggtttggagaagcgtgctcatcaccgtccatcagaattgtcagggggagaacgccagcgtgtggcaattgccagagcgttggttaatgaaccttctttagttttagcggatgaacctaccggtaacctcgatttacgtaatgcagatagcatctttgcattattgggtgagcttaaccggcagcaaggcacggcatttctggttgtcacccatgatttgaatctcgccggcaggttaaatcgtcaggtggagatgcgtgatggctatttacaggatgaattgaccgtgacgggagcgttgtaatggcgaatttgcctctctctttggtcactgccttgagatttagtcgcgggcgtcgccgtggcggtatggtatctctgatttcggtgatttctacgttagggattatgcttggtgtcgctgttctcatcattggtctaagtgccatgaatggttttgaacgagaattgagaaaccgcatcctttctgttgttcctcatggtgaaatttatacggttcatcagccttttgaacagtggcagcctgcattggaacgggtaaaaaacaccaccggtgtggttgcggcttcaccttatattactttcactggattgatggaaaaaggtgccagcttgcatgctgttcaggtgagaggggttgatttagccacggaatctcaggtcagctcattaccacaatttgtccaagataatgtctggcaaaattttcaggcgggtcatcaacaggtcattctggggcagggagttgctaatgctttaaaggttaagcagggtgattggttgactgtcatgatcccgaacaatgatcccgaaatgaaactgttgcaaccaaaacggattcgtttacaagttagcgggatttttcaattgagtggtttgcttgatcatagtttggctttggtccctttggccgatgctcaacaatatttagattatgggcaagggatcactggcattgcaatcaaggttgatgatgtatttgccgctgatcaacgagtaaggtctgccggggaagcatcacaggaatatgtctatatcagtagttggataagaaattatggctatatgtatcatgatattcagatggtacgtagcattatgtatctggcgatgattctggtgattggcgtggcatgttttaatatcgtttctaccctgattatggcggtaaaagataaaagcagtgatattgctatcctgcgaaccctcggcgctaaggataggcaaattagagcagtttttctctggtatgggttattgacggggatgacgggcagtattgctggtgctgtagctggcgtgttggcatcactgaatctgacagcgcttattcatgggctggaaaagctgatcgggcatcaatttctttccggtgatgtttacttcattgatttcctgccatctgagttgcatggcatggatgttctgtatgttctggcgacggctctgattctgagtttattagccagttggtatccggcaaggcgggcaagtagacttgatccggcacgaattttaagtggaaaataattaatctattattggcatgagctaatcaaaacgttatggtataaaaaatagaaacctaagcaacatttaagaaatcttgaaggaaatcagtatgcgagttcgtcgtcggcttagtcggcttggccggcttcgtaaggttaagcgtttgaggcatcagagatttcgtagccggattttttatagggacaatcgattggcgcttaatatgaaaaaaccttacatcgtggtattgacaggagccggtatttcggccgaatcgggtattcggactttccgttcctctgatgggttgtgggaagaacatcgggtggaagatgttgctacacctgaaggttttcagaaggatccagaattggtgcaggcattttataatgctcggcgtcatcaacttcagcaatcagagataaaaccgaacgtagcgcattatgctttagccgcgctggagcatgaacttggcgataattttttgttgattactcagaatatcgatgatcttcatgagcgggcgggtagctatcgcacggtgcatatgcatggtgagttgttcaaaattcgttgttgccaatctgggcaagtgtttgagtggacagacgatttaacgacagatgaacgttgccattgttgtcagttcccttcaccattgcgcccacatgttgtttggtttggtgaaatgcctttggagatggaacagatctattctgcactggctcaggcagatatttttatcgctattggcacttctggccatgtttatcctgcggctggatttgtacatgaagctaaactggcaggggcgcacacggtagagctgaacttagaaccgagtcaggtagaaagtttatttgatgaaaagcattatggaccagccagtaagatagtcgatgagtatgctcgaaggttaattgatagtattaaagaatttaaagctgatttgacgcaataattattgtgtttctcttcctcataatgggtaacaaaatccctgggggaagagaataatggacagattactagaacgtttttttaaatacatatcttttgatactcagtcaaagccgtcagcgaagacgattcccagtagtcatgggcagctcgaactcgccaaagcgctgaaacaggagttgatcgaattaggtttttccaatgtggtacaggatgctcatggctgtgttatggcaacattacctgccaatacatcttggcctgtacctgctatcggttttattgctcaccttgatacttcacctgatttttctggaaaaaatataagtccacaaatgttggaaaattatcgaggtggtgaaattgcgctgggggcgggtaatgaagtgttatcaccggttatgtttcctattttgcataatatgttggggaaaacactgattaccaccgatggtaaaacgttgcttggtgccgatgataaagcgggtattgcagaaatcattactgcaatggttcgtctgaaaaatagcaatatcttacatggtgatattcggattgcgtttacacctgatgaggagataggtaagggagcacgctattttgatattaattcatttgatgctgagtgggcatataccgtagatggtggtggtgtaggtgaactggcatttgaaaatttcaatgcggcggtagtaaccgttaagattgttggtaataatgttcactctggtagtgctaagaatgtgatgatcaatgctttatcactggcgatccatatccatcaagcattgccatcggaagagacaccggaacataccgatgggtatgaaggcttctatcatttgcaacgtattaaaggcacagttgagtgtgctgaaatgcactatatcattcgtgattttgatcggaataacttcgaagaacgtaaaaagaagatgattaaaattgctgaaaaagccggtgagggattgcatcctggttgttatatcgaactgactatcgatgacaattattacaacatgcatgatgaagttatcaaatatccgcatgttattgagattgccaaacaggcaatgctggattgtaatattgaacccattattaaaccgattcgtggcggtactcatggcgcacaattgtcgtttcgtggtttaccttgcccgaatatattcatgggggggtataattatcatggcaaacatgaatttgtttcgttggaaggaatggaacaggctgtcagtgttgttatgcgcattgctgaattaaccgcactgttgtctaaaaagtcggaaatgagtcaggcgttttgcagtaggagttaatttgatcggatattaacggcaaaccctggcactaccagttcttaacaaactctgcggaattttccttcctgaatgctaattgagagcgaagcgaacttaagaagtccccactataatcacttgtgatttagtggggagaaaatcaatattattgaaatcaacctcttgggatgaggtatcaatcattaaagtaccagtaaccactattgaccaatgcagtgagcagtctgataaaacgaacatcatctatcgcttcaccaagcatttctgcattaatttcataatggcagcaaagaacatcagccgctttaatatgaggtgtatctattaattcaccgttaacaaagcactgatcaccaaccctgataacccgtaatccgttaagacggtggagattttcaccttgtttcattaattcataaatttcatcactttcataaggtggctctggtggcgcaatatcaagttcatgccgtgactgagaaatgaattcaccaaaccattgttggaaagtgtcaggctgtgccaataactcgttcatcatggtgtgtagcgctgataattcatgcggctggaccagcgccggattttcgcggaaagtcagatcggcatcgctataacgatagctgcctaaatcattagccagcacataatcggcgaagctactgaacagttcacgggaattgggggcgcggaaaccaactgaataatttagtgaatcttcgatggaataaccttcatgaggaaatcctggtgggatatagaggatatcgcctggttccatctcttcgtcaataacggcactaaagggatcgacctgtaatagatcggggtgagggcagcgttgttccattggtagcttttccccaacgcgccagcgacggcggcccattccttgaatgataaacacatcgtattggtctagatgcggaccaacaccaccaccgggaacggagaaggagaccatcagatcatctatccgccagtcagataatacgcggaatggttgcattaatgcggcggaaggacggtgccagtgattaaccgcttgtaccagcagtgaccactctttttcacctaaatgatcgtaactttcgaatggaccatgagagacatcccaacggccatttttctggctgaccagacggcagtcaacttcattttccatagccagccccgcgagttcatcgggagtaaggggatcaatgaattgacggaagccttgtttaatcagtaaaggccgtttttgccaatgattatgcaaaaatgcctgccagtccagattcaactgatagtccatagtgacatcctgagtgtgaagtgaatttcagggtattataacgaatagttaaactcagtatcagactacactggcatatttaactaatcatcatcattaatttgctggcatcggaatataacgcaaattctggcaccaccaagtggactgtcactgatactgatatcacctttatattgttcgataatttcagaagcaattgacaatccaagcccttgaccaggcttcaaagtatcaacacgttgacctcgttggaaaatgatgtcccatttttcaattggcacccctggaccatcgtcgtcgacaataatcattaccgaatcgtgatcaatcgtcacagagatctcaacaaatttaaggcagtacttacaggcgttttccaacacattacccatgacttccataaagtcatttttctcaccaagccaggtgatctccggtgagacatctaacgtgagactgacacttttacgctgatagacttttgttaaagcgctgcataggctatctagtaaagcaggaacagaagagactttccgcataatagtactgtgttcactgcgcatactggcacgatgcagataatagcctatctgctgagaaatacggccaatttgctcaagcatgataggttctgcctgttgaatagtcatttgtttgctgtcacgcaaagaacggagagttgattgtaaaacagccagtggcgttttcaagctgtgtgtcagatcagccagtgttgttcggtattttgtatagcgattgcgttcattattgagcaacacattaaggttacgaactagcccccgcagctctgttggtggattttcatccaatttttcccgctcacctttttctaatgaactgatctgatgaataagcgatttaattggccgtaaactccagtgtgcggccagccagattaatgggataaccagaataagattggcaatcaatacataaccgaaccattcccacactagaactgttttttgtaaatcctgtggaatggtatcgatgacgacaatggttaacgctggcaaatgagctgttgcactatatctgttgacagagacggagtgagttagctcattatcttcattttcgtcaagtgaattaagtttacctaattgtccttgtgtgttagccgagttttttagcaaatcccggctgctttttaggtcagtatctagttcatataaaccgtcttcttttaaccattcactaggaatagagttttcgacttttgggatatggtgttgacgccagaggatggcacctttgttgttataaatcagaaccaatgatgggttattcagtgtgaaattgggggggactgaaatatctagctgattgttattccactgagcaaggctgaaaaatagattactctgactacgtagcagtgtataagcagttttatcaaaactgaccaggtaaccgacaatggcaacaataccgtaagacatggtaagagcaagaataaccgcagcagttgccattaaaaaccgggtacggagtgagaaaggctgctttttgtgcttaagcacttttttacctatgaaagttttacacatcgaagcgatagccttggccccggacagtcacgatagcttcataaggccaaatatctaatattttttttcttagtcggccgattaagacatcgatggagtgaccttcgcgcagttcagcatcgggatataattggcgcattaatgactctttagtgacaactttatcgctattacacatcagtatttcaatgattcggtattcaaacgccgttagtttgacgctctccccgtaaactgtaaattccttgcgtgacagatcgattttgaaaggtgggaattcaataatctgagaaaccagcccattattacggcgtaggagtgcctgcatacgggcaataatttcctcaagatgaaagggcttggtaacataatcatctgctcctgcatcaagaaccgtgactttttcttgccagctttcgcgggcggtcaaaacaagaatggggagtttttcatctttttggcgccagcgacggatcaaactcaaaccatcttctccgggcaaaccaagatcaacaatggcaatatcgggttcgctctcgaccagatagtaatcggcttctttggcgtttgcagcggcatcaactagatgaccggtgtcacgaagctgtaccgttagatggtgacgcagtaacatgttgtcttcaacgatcaatatccgcatggaataattcctctccagcaggcagttattgtaataatcaattcattcggactattatatagacaaaactgccagtaaaaaattcaatgtcatggttctgctgagtatgttagatacatggatctgtaacagcaagacgttaagtggaaatagagaatataactttagagtatgtttgggattggtttatataaggatagcaacagacggatgttttatccgtctgttgaatatcaactacttcaattcatcaaccagtgtgattgcacggccaatataatttgctggcgtcatggctttcaatcgtattttctcttcttccggtaaatccagtccatcgataaaggttttcattccttcaccgttgacgcgtttaccgcgggtaagttctttgagtttttcataaggcttttcgataccatagcgacgcatcactgtctggataggttcagccagcacttcccagtttttatctagctcatccagcaggtgctgctcattgacttctaacttatttaagcctttcatcgtagattgataagcgatcagagcatatcccaggccaactccaaggttacgcaatacagttgaatcagtcagatctcgttgccaacgggaaatcggtaacttgcttgccagatgaccaaataccgcatttgccagccccaaattgccttccgagttttcaaaatcaattggattgactttgtgtggcatagtggaagaaccgatttcaccggcaaccgttttctgtttgaaatggttaagtgcgatgtaaccccaaatgtcacggtcaaaatcgatcagaatcgtgttgaaacgggcgatagtatcgaacaattcagcaatataatcatggggttcgatttgggtcgtgtatggattccatttgatgccgagtgaagtcacaaaagtttcactaaactgatgccaatcaacctgtgggtaagcggctatatgggcattatagttacctacggcaccattaattttaccgagtatttcgacttgttccagttggcgatactggcgttccatccggtgagcaacattggcaaactctttaccaaccgtggaaggtgtggctggttggccgtgagtgcgagataacagtggtaagtctcgatattcactcgccatttttttgatggtatcaatcatctgacgccattggggtaaaagtacttcttctcgggcggtttgtagcatcagcgcataagctagattgttaatatcttcagaagtacaggcaaagtgaataaactcagaaacttgatgtagtgcaggaatatgtgcaactttctctttcagaaaatattccactgctttgacatcgtggttagtggtgcgttcgatagttttaatacgcattgcatcctgttcattgaaatttgcgataatttcattcaggtaagcgtttgcgtctgtatcaaacgcgggaacttctttaatttcagcacattctgccagtttttgcagccaacgtacttcaacctgtacgcggaatttcagtaagccaaactcactaaaaatggtacgtaatacgctgactttatcgccgtaacggccatcgatcggagaaacagcagtcagtgaggataattccattggtagcaactcccggattttatttaacaatgagaaagaatatctttcgcctgttggatcagacgttgacgagaaaacattaattgcaagcgaccaccgccaacttgttgccataagaccgcgcaacggacgccagccagtaaaatagcccggactttcgcttgtaccagtggattgcgcaggatatcaggggaaccagtcacttggatgcgtggacctaatgggctgataacatcgacataaataccggccaacgcattgaacatcccttctgacatgggttcgaaatatgcctgttgacgttcaagtaaactgatacggttacccaatgcatcggaagctgcctgatttttcattagccggcgctccaatgctatcagactcaagatatagcgggtaagatcggcagaaataccattgttagagctattaaacatccctagcattgcgttcagcccaattttcagattgcgttcatgattgccgaacacatctaaaacagatgccgggttggtgtttaaaatgctattaaccatggtggtaacagcatcagtatcacactggttttcatgagacagttgttgtaccaagcgacctgactggcaaattcccgccagcgctagtgtaatgttgtaatgattctttgccacaattactcctgcaaacgttgttcgatcactccaccgccaagacaaacttcaccctgataaaagacggctgattggccgggggtgactgcggcgacaggattagcaaaatggacttctattttatcttcgcttataggggtgacagagcaaggaatatcttgctgacgataacgtgttttgacgacgcaatggattttttcagttaatgtctgtctgtcaacccagtaaagttgctgagcaataaggccggtagacattaaacgggggtgttcatgcccctgtgccacgatcaggatgttgttctgaacgtctttatctatgacataccacggctcttcgctgccttctttcgttccaccgattcccagacctttacgttgacccaatgtgtggtacatcagcccctgatgttcaccaagggattctccatctactgtcataatcgggccaggtttggcgggtaaataacggccaaggaagtcacggaatttgcgctcgccaataaaacagataccggtggaatcttttttctttgccgtcaccagaccgattttttcagcgatacgacgaacctctggtttttccagttcaccgaccggaaataggctttgagcaatttgctggtggcttaacgtgtataagaagtagctttggtctttattattatccagcccacgcaataattggcttttaccgttaatatctctgcggcgaacatagtgacctgttgcgatgtaatccgcgtttaaatcctcagcagcgaattccagaaatgctttaaacttaatttctttgttacatagaatatctgggttaggtgttctgcctgctcgatattcagcaagaaaatgttcgaaaacattatcccaatattcggcagcaaaattgacggtatgaagttcgatgcccaacttatcgcaaacggattgggcatcagccagatcagtcgcggctgaacagtactcttcatcatcatcttcttcccaattcttcatgaacaagccagccacttgataaccttgctgttgtagcaaataggcggaaacggaggagtctacaccgccggacatgccgacaatgacttttttctggctgttatctgacatgggaatctcactggagaaaaaaacaagcgccgtactttaacacgttgcaaatcggggtgcatcaaacgtatcactgttttgccattaaataaacggagaaacataactatccagtagagtgagaggatgcttttcgttttgcaggtaacagcgaatactttctgcgacgagtggagaacgaagataatggctactgaatatttgttctgctgtaacccaatggcaacaatcaatatcacggtcttgcggatggggtacggtttgttgttccatttcaaccagaaacagaaaacggataaagggggtgccgtctggtgcaacccactgatgaactttcagcagtgcttgcggcttagcctgaatcccggcttcttcccataattcgcgttccgccgcttgtaacaatgtttcaccagcctcaagatgaccagcgggttgattccataatgctttgccattaattgtctcttcaacgaccaggaatttattttgggcatggacaatacaggcaactgtgatgtgggggctaaacaaaattaatctccttccattcaccgggtttcatcttgcctaatggtaagtttcccatactaaaacgaatcagccgaagtgtaggaaaaccgatatgtgctgtcattctgcgcacttgacgatttcggccttcataaagtgttatttttaaccagcttaccggaatatttttacgttcacgaatcggtggatggcgactccagagccatgtcggttcatgaactaactcgacacctgcgggtagggtaggcccatcttttaatatgatgccattgcgtaacttatcgagagagatttcatcgggaacgccttcaacttgcacataataaactttggctgtttttttatgcggttgggttagctgtgcttgaagtttaccgtcattcgtcagaattagtaatccttcactgtcacgatctaaacgcccggcagcatacacattagggaacgggataaaatcttttaacgttgttctgcccatttcatcagtgaattggggtaaaacatcataaggtttgttaaatatcaacactcgacgaggttctattggttttttgacagaatgcgatatttttctttggctgaatcggttaagtttgtgttttttaatagcgatatttgtcatcatagatcactgaataaaatggaaggggcattatacattaatctgctatcaattggcgtttgcagaatattcaagtagtattgacacgtcccttacaaaaaattaacaaggtattacgcttacttgaaaggagaggttaatggaaagcaaagtagttattccggcggaaggtaaaaaaataacagtcgacgctaaaggtaaactggttgttccgaataacccggtcatcccttatatcgaaggggatgggattggtgtcgatgttacccctgcaatgttgaaagttgtcgatgcagcggttcagaaagcctatcagggtgagcgtaaaatttcctggatggaaatctacaccggtgaaaaatcgactcatgtatacggtaaagatgtttggttgccggatgaaacgttggatctgatccgtgaatatcgcgtcgccattaaaggccctctgacgacgccagttggtggcggcattcgttctctgaacgtagcattgcgccagcaattagatctgtatgtttgcctgcgtcctgttcgttattatcagggaacgccaagcccggtcaaacaacctgaattgaccgatatggttattttccgtgaaaacgcggaagatatttacgccggtattgaatggaaagcggggtctgttgaagcggataaagtgatcaaattcctgcaagaagagatgggcgtgaataaaatccgtttcccacagcaatgtggtatcggtgtgaaaccctgttctgaagagggcactaaacgcttagttcgtgctgccatcgaatacgcaattgataatgaccgtgaatctgtcactctggttcacaaaggcaacattatgaagttcaccgaaggtgctttcaaagattggggttatcagcttgctcgtgaagagttcggcggtgaactgttggatggtggtccttgggtaaaaattaagaatccgaaaaacggtaaagagatcattgtcaaagatgtcatcgcagatgcgtttttacaacagattctgctgcgtcctgctgaatatgatgttattgcctgtatgaacctgaatggtgactatatttctgatgcactagctgctcaggttggtggtatcggtatcgctccgggagcaaatatcggtgatgaatgtgctctgtttgaagcgactcatggtacagcacctaaatatgccggtcaggataaggtgaatccaggttctgtgattctttccgctgagatgatgttacgccatatggggtggacagaagccgcagatctgattgttaaaggtatggaaggcgcgattgccgcgaagactgtgacttatgatttcgaacgtctgatggaaggggctaagctgctgaaatgcagtgaatttggtgacgcgattattcagcatatgtaatctgtcatcttgcgaagacttcacggtagctaatgcttccgtggggttttctaaattttgccagtgagtgtatactgaaagtaatattcgttctgtctaatagagagagggagtaaaaaatgagtggctcagatgataaaaaaatagagtttaatacgagcgatgtactgaatgctctcttacaccgagggcagaatatgcaacatcttgcaactcaggaaagtgttgataatctgcgccgtgagaccgaggttaactttgcatcacttgataagtgtttcgaatctattgataaacgctttgaatctgttgagaagcgattcgaattaatagatagacgcttcgaatctatagataaacgtttcgatgttatggataaacgttttgaatctatagataaacgttttgataaacttgaaggtaaatttgatcgacttcaatggtttattgttgcggcggcactggcgttgctattcaaagaatatatttttaaggcggctgctgttatccagtaacttgcaatctcctgcaagttactgctaactcattcttctatccattatttcatcccttttgctacggtgttttccagctcacactgaaacggtctgagctgtgttgaattcctttgctctaataacccattattatgaagccatattcatatttatgaatcattcatgttaatacacagaaatttgattgataacaatgtgtcgtttttggcccttttctaatgaatgttagtagaaacagatcgaaatgtttggtcgaaatgagatatatatttctctttttcatacagtgtttgcaatctttgctcaagttcattaatcgatgctttaaggagtggatgttgtgtttcaggtaataagtcattgagtggtgtcaaaacaaagaagcgcttatgaaacctcggatgaggaacaatcaggttctccgtagatataaccttgtctccgtataagagtaaatcaagatccagcgttcgaggagcattgacaaacgagcgtttcctgccgttgagagtttcaatacttagcaattcggtgagcaaaacgaccggtgttagcgatgtttcaaagacaacaacggcattcaagtagtctggtgctcctgtactgtcaatcggtgctgttttatatatcggactaaatcggaagtttgtactttccttcaatgccagcaaatgattttctgctgttaacaagttgtaataaggctgactaagattacttccaattgctactgctgctatgactttttcgtgcttcatatcatatttactcgcaaaaaattaaatcacctgacacttattattccatcatgaaaccgtatgttgctagcgtggaacttttatctggaaagtattgcaccgccatcgatcctgatgatgtgacctgtaatatactctgaaattgcaagaaatcgtaccgcctcagcgatgtctttgccatcaccaattcggccaagggggatttttttcaaagtggtgaatttttcgttatcgtccaatttattacttttttcaggccacatgatcgttcccggagcaacgccattcacccggatattgggtgctaactctaaagcgagggcttctgtgagtagtgcgaggcccgcttttgcagcacaatagacaggatatccttttagaggacgcttagcattgatatctacaatattgactatgttcccacgaacctgatgcagccaaggcatggcagtttggatcagaaaaaacggtatttttagattaatatcgaccaaatcatgccattggctatgggaaacagatccaatttctgttgggtaataggttgaggcattattgactaatatatccaattgtccccattcgcttattgctgcatttatgatgggttcacaattgcataaattactcagatcggcttgcacggatattgtagattgggctcgtatcgaatttaattcctgaacgagttggttggcctctaattgggatgtattacagtgtaccactatattgaatccctcagcatgcaatgtttttgcgataaccgcgcctaatcttctggcagcacccgtgatcagtgcaactcgtcgctttcgcattgatgtagaatgttcatttttcatattgattttccgtcattaaagtagatctcacgaatacagataaattaagtttccatatatttgtgaacaatcatttcattgatttttacccgatttaaaaatgaaaggcgtctggtatcatcaagaatacgacgagctatactcattaccacattataagcttccgataaccagtatttttcctgctccatatctccacagctgattgctacggtatagtggttcatgtagatctcctgtgcgcggagagcgggtagccatcccatgtgaatgagcatatcaatagcagattggctatattttttggcggcgtcaaagtcatttcggctgagggaaatttgtcccataagcgataaagaaaggatttcgctacgatatattcccgcttggtgtgcttcagagatattttcctgcaagatttcttcggccaaggagatattttgtttggacggactactttctcgttgtaaaagaaattctgcatagtaatttctgacaagcgttatcaacggtaagctgcgagctaatctgctctctttccaccctgttatgaggtgttcacgtgccttgtcatattttccccattccatatagaccttgccaaggagtgcacgattatttgcattccatgcgtgtggcgttttctcagggatgaaatattcaaggcagctgagtagaagcgactcagcggtttcataatctcctagactgatatggacttgtgccaggtagttgcagaagatggaaatgtcgaatttgatgccgaggtgcaggcttgactcgtaaactttggacagatgtttcattgctgcttcgtagtttccaaaatcgaattcgcaaactccatgtatcgaagaaataaaatggatatgcctttggttttccaatgacagttcatgacttactggactctgatgcaggatatcgtgggcttgccggatcaattctctcccatgcttaaggctgattttcatagtcttgtggcctaattcagctaatgcaagggctttgatatagggagtacaactgttttcagctaaaatgactgcatcttgtattgccaagatggctgcttccgatgattgtgtattggcgaggtactttcctttgagaactttcagtttaatatgcgtatcaagtgatattttcttagtataataagtttctgccaaggagaatagatcatgtcttgtccatttctcagtgaaagggagatggcattgttgattataaatgtcatgtataaacagtagcatataaatacaatctagagtgatttcatcttgcagacaatacggttcatttgcagccctgagctgtgtgtaacaatatttggcgcagtgttcgaaatcttgacgatttaatgcttcgtgtgctaatcggtgtaattcttgagctggtatcatgcttgattactcaatggtttcacaagtatctttaagtttaagcagcgtaatactgctctccgaacatgctttccgaaggactgctgtgaatgatcgaactatggatttcacggttttctgttgaaagagatcaacgttatatactagctttgcatatatattttcatgctctacagatatccatagcgtcatatctaaaactgtaccgtcaaaaggttctctgccacgccctatatctaagttcatgggtatggtctcgatgtttcgtaaggtcaattttgcgttgggaagcatgattaacatgacctgaaagatgcgtgatcgtactttgtgtttttcataaggagcgagtgcatcggcaattgtgccgaaagaccaatcaatattatcctttgcgtccagagtgattcggcgtatcgatttagtcagtaatgtgaatgcttgtgtatcttcaacgaatatgcgtgcagcccaattgtttgcaaagaaaccgagattatttccatattccggttgtctgttgtccgccgcagtgccaataacgacttcttgttgggatgaataatgggaaagaacaattgcccaagctgacataagaaccgtatagggtgtggctcctatatggcggctgaattcaaggacaccaatctcttgtgggatctgaaacacttctgatgcggaacatcttgtttgatagatttctgattgattgcatatagggagagcgagtagggaaggtgcaccttccattttatgtttccagtaacttatttgacgttttacagatacatcacggatatattgttgttgccagttagcatagtggcgatattgtcgttgtagatcttttggcaaagcgactgatttgtcaccgcatgcatgggcatagaaagttgataattcggcagcgagaattcgaatagactcaccatctgcaatcaagtgatgtagacaaagtgttaaaacctgctcgtctgttttgagaagaatcaggcttacgtgaaacagccagtcgcctgcatgccagatacattgtgaattacgttgtaaggcggacattaattgttcgtcttgaccttctttggttattgcagaaaggtcaattatctcaattggcagatcggcatcttcttcaaagtacccaatcaatgaagcggtggtccaatcgaatcggctacgaaggatttcgtgtcgttttgttaggtgatgcagtgcttgccttaatgcctctctatcgagatgaccaatgagccgataagcgcggaaaaggttatagtcagagggatctccatcagcgcataatttgagtaatctctcttgttgaagagagagtgtggcgtagttatccggcgacgcaggtaaaagatcgtcaatgtttcgtggtgtttcattaatcagctgtgtaattttctgggtgaatttttgaagggtggggttttcgaaaagcaatcgcagaggtacagcaacggcaatatgagccgcgacttgcgatatcgtgtgggcagccttcatcgagtcaccgccgagtttgaagaaattgtctgatggattcactccttggcattcaagctgcgattgccaaatattgctgatatcgtcagctaattttaaatttgtcggggaaaagcgattgtgaaccggggtcggttgctgagcttctgtatcggataagtgtaatttagtggcattgctggtgagtagtcttcgtttaaagtcatttaaaaattgtgctgcgatggcaccagtgatgactctatgatcgaatactaaggtgagtgacatggggtatccctcaagatctttatcacctccgattcctaggatggcgcattgctgcttatttaacatgggctgaaaatgaagaacattctgaccagacaggtcggaaacggtaaaggtcgctcccgtaacatcttcaaggcttaatttgttttcatggtatcggcagacataatcggcgacagcggcttccacatttggcaatgctaattgatttatttgccgaatcacggggactcgcaggccatgattcatgtcaattgcaacgccaatattcactgtgctgtagcgatgaatccgttgtttctcataataagagcgtaattgtggccagtcttgcagtgtaataccgagtatccacaaaagataagggaaaatttgtccactggaatttgtatcatttcgcaatttttcccgtagattgatggaattgaactgcacggtgatagaactgggtaatgagccattctgagcgtcagagagaatgcgtatttcagcttgtttcgaaacttcgatcggttccgtagtcgtgatattttcgactaatgataaaatcttatccgattcgtgggggtcagctaatagtgtagttgtgaatggcttttgaatgtgtttttccacagcgaaatgttgtctgaggtaatccaaagttatgaggccgctgaatcccagttttgaaggattaattctgtggtgttcgagatatgcggtagcggccttagagaatctggccgttgcgttgcttctatccacttggaacatggatgcgtcgggatcttccttggttggggtggaagtaggttcttggacgatttcagcgataacatttcctacagcaacctcatctcctgcttgatacctcttaagcagatatcctgacatagggctatggatttccactatggctttggaagcttctaccctcgcgatcatttgcccgacagtgacataatctccctcttcgaccaaccattctgagattaacattgtctcgtcgttggcgcttagcttctcaagaataatggtatttttcataatatacctattgtggtcgtattaatttcaattaaagacatttattgttgaggctcagcctctgatatgtatgccttaagaatacgttcaatcagcatgtcttttcctggaatcataaggttttcaagggctttacttgagggtatcgccatactggaaggatatatgcgtattgtacgaggtaataacttacccaaaatttcagtcaattgagcaacgacttctgaaccgaaacccgcaaatccctgaccttcttcaacgataatggcgattttgcatttcgatacgagtttgatatatgggattacactaaacggatatatctggagtgggcagataacttgagcaatcacatcgtgttctacgaaaagttcttctgctacatctaccagtagatcgctcagcccaccataaccgaagattacaacgtcgacgtttgttgacagagggcttacaacgaccgctgggaatggatcgtcagaggcatagcttgtgaaccccaatggagcatttcgaatgctcttggtatagaggattttattttcaataagaagaacaggaccttcctcctgttttgcaagtgttttatagactattgccggatcgataagattgttaattgccagtatcgtcagacctggtattcccatgaaatgcttttccagagtttgactatgggtaggcccgtaaccgcggccagcgcccattggtgtccggatcactaatggaactttcacctgatcgttgtacatgtccctgaacttggctgcgtgattcaatatttggtcaaacgctaaagtcaagaagtcgccgaacatgatttccacaaaaggacaatatccatgcatggcgagcccacatccgatgccgacaatagcgctttcggagatgggagtatttatgacttgttcgggaaagctatcggacaggccatcggatatcttaaatgcgccgccataaggcgctttcacgtcttctcctatgaacaggatatttttatccagctccatgatttccaaaaatgccttattgattgcacgggatagccgaatcttagacccctggctgggtagcggatgaaatgtggaagatcgcgattgcaattgtgtttcagcgccgtaaaacggtgatgagcgagcctgttttgcctttcttattgcgtcatttactctttcttgaactccggcgacttctgtctccaattcagcagcacgttcacgcagaatgacattgatgggatcgatagtattaaagtgttcgatttcatcgatgtttcttagatcgtctcctttggagtgagctttgagacggtaagtatcgatttgtagaaaagcggggtgtctttggtttctagtataatttatcagctcttctgtctcagctatcagatgttcccaattccaaacatcagatttcgtatatctcatgccaaaagcctgtgcgcgtttgcttatgctgcctgataatgtctctgagatatgagtagattgtgcgtattgattgttttctaacacgatcaatagcggtagatcccactttgctgcgatatttaatacttcatatacgacaccctctccgagagtgccatctccgataaatgctattgagatggaattatcatggcgtaacttcttggcgaaagctgccccggttgctaccggtaagatcccgccttgaatcccgttagaaaaaaatccctctttgcatagatgttgacttcctccacggcctccacacacgccggtctcttttcccatcacctctgcgatcagtcctgtaacatcgcctgtccgcgaaagaaagtggccgtgacatctatgattggagaatacccagtcattttttttcagaaacttgcatactattgcgcctgttaactcttgcccaatgcatgtatgcactgttccatggagctctccagtggaataaagacgtaacaatgcttcttccgtttctcgtattagtagagatgtccgtaagatatcgctgtccatattcgtcaaccctcattcatcgtgattcgttactttataagcgctcatgagtagaatcggatgtcacaacatttcttgagtcatattcaaaccggcccattgcctgtgaataagctttgagttcctcaaaccgttgactgagaaatgcgctgcgttcttcttcatgaattgactcggcattgcaatctgtaaaacaattgggtgtttcatagagtctgatgtgatgaatttttaggttatcccattcattaaaaagaacctccatagtgaggaatatttctttggcaatattctcaactgttggattacagtactccccatgacgatttaagctcatcagtcggaatttactgcgtgtagcatgaacagcggatataaagtctgcatccttgggattaagaattgaggcgtgatccagaaactcatcaatccatgcggcacctatgcgctttatctctttgaaatctatcgcgtatccaattggttgcatctgttcaaatgagaaagtaagttcatacagataagtgtgtccgtggatattgaagcatttgaccctttcattcattacgcgatgagcggaatcaaaagagcctttgcgagtaatatattgaattgtcatgcaatacctctaatcaattcatagaactcttgttttgccggtgaatcagcttcagcgaatgcacctgaaaacatttgtgtcttcatacggcttctctggtggcgtacacctctgcaacgtacacaattgtgcgatgcatcgactaatactgcgacgccttggtttctttcacatacttggtttactgcattgtggattgctgctgttaaccgttcttgtatgagcccacgtctgccgaaatgttcgactattcggtttaactttgacaagccaagaacacgcccgtattgacttggcatataggcaacgtgaacatagccactgattgcttgatgatggtgagagcacatggaatcgagcgctatccagccgtcgaatacaatgccatcgtagttatctgccggaaatgtagtgatgggtcccattggtttgtatcggcctttccataggtcaagaacataagcctttgcaacacgtctcggcgtgtcttttgagttaggatcatttttccagtcaacgccaagagcagtcaggaattctccgaatgatatagcagcttcatctataataaggttaagttctgttttggttagaacctcattgggtccgtgtaatgcgcgcttttttgctaattgcatggatattccatcggcaaatccatgtgtggcaacttccaagtctcctggctccaccgtcggcataggcacctcgttattgtaactagatggttcattatgatccgtttggagaaacgcatatttccatttaacggatcggtatttaacttcttactatctgaatcctaaataaaataatggtgggtatcatgtcctttgcagtcatatttaagaccttttaggtcttaatcaggtaagctgatattggtatccttgttttctggtcccaccacttagttattggtgaaatcatgcattcagtcggatctgtttggccgttttttcggttttttatataaatatttaataattagctttctagggaatagttatagttaaggaaagagtgagctttatttattgttattgtaaatgtattgacgtacagtttgataaatattgattaaataaattaatgaatttggggtatctagatagctaactattttaagatcatcaaatgctattttcttctaaaactaggcagatcttgcctggtgatcggttatttcatgtttactcaaaggaggtttttatgtaattcggcatttataatatgggagatgtcacccctgatctaacctacgggacaataccaactaaagctgaacgtatttagatgatctgaaagaacaaattcaaattaaagaagcgtttagaaagaataggcataagtctgtttagtgaaagattgaggttacatatatatgaagttacgacatttacggtgttttgtagtagtagcagaagaattacattttgctagagctgcggaacgcctgcatatagaacaatcaccgttatcaagaataatcaaaaaattggaagacgatcttggtacgatgttattcgtacgtactacaaggaatacccggctcacacgtgcaggggaaattttactggagcaaactcctcgcatcttttcagtactcggccaggctcgtgatagtgtgaaagcggttgcggccggattccatagtcaacttcgtattgcgttatctgatggcgttacaccatccaaattagctgagctgttagcaaaatgtcgtgaggacgagccggagacggatattcgtttacacgaggtacctttagctcaacatatgaatggattacgtgataacctttttgatgtgggattcgctcaatctacgatagtgcgagatggcatcattgcaataccggcttggtatgattcattggtggcggttattcccgccaggcatccgcttttggcatataaagaattaccgctgaatgaatttttgcgctattcactgattgtctgtggtcaggaaactcacgagggatttctgagacaagttctgtctatattccaaaatgcaaagttagttccatgtatctccgaaaaggttgccagttttgatctcttgttaactttagtggctgccgggtatgggattggtgtggcgggagagtcacagatcaatttggctcggcatggcgacgttgctataagaccatttgctggtggtattcctaaactggtgacgtatatgcttaggcttgactccccgttaacagaagaacttgtacggttcaaagaacgggttggaaatttgtaccacaatgtttattgatcctggtaggggaaaagggctttaaaactctgctaggacttaaaagtgcaattcgcaatcttctaaatttgtagagaattgcgaatttttgacaaatatttggctattcttttccaataatccgatgagcgttttcatgccaaccaaagtaggggacttaagattcctatcttgagaaggaatttgatgatcagcttggtttgataaacgataagtaggtataccctttatctttcaagttgcctctttgttggctgcactcactcaccccggtcacatcgttatctatgctcccggggattcgttcccttgccgtcgcgatccatcttgaaatctatagggtatatgagaagttaaaactggatagttaatttaatgtcgtgtaaaaatctttattgttggtgtatttagataaaaacgctaacgggagtttgttctcccgctggttttataactgtaaataaagtacttactgtataatatttgaaatgttattatttagttattgtttttccttattaagaattttttcatattcctcccaaacgacagataatggtgaacttaaacaacaaatggatattgaacctcctgatggagggtgatattcatatttagatctcccacgatagactcttataggtaaattgttatcagtgggattcttcctttttcttcttaacatcattcataacctcaacgtatattgtttaaattatgcatttagaataaaagtgagatatttatacaatattaacttcataaacatattttttttgtaaaagataacaaatgaaaatattagcagtagataataaaagatccagttttatgttgcatatgagagaagttttttcatattttttacaatattgtttttacatgaaataatattttaatgaaattaaaacatagtgttaatgtaatgtaaagtaaaagttggttttaattatgtgtagttgggttaagcctgttgtttttatcgtctaatgcgatggcgattaatcatgtaactgatatatacccgttatctttcaagttgcctctttgttggctgcactcactcaccccggtcacatagtttgctatgtgaccggggattcctcccttgccgtcgcgatccattttgaaatccagagggtataggtgtgatttgagttaaactgtctttagctgaccatcacggtaaattgtcaaagttaagtcttgcgttttttgatttatctaagacatctgtgctcgtcgtatccggtcttagggaaatttaaagtggtaatattattgtaatgattttggtttgcagtgtacccgattttgcttagaactcagttgctcattcagcaaattttctacaaatgttgttaaaagtttggtctatctggcaggtaatcaaagtactgctcgaacttttataaaaaaggatcttattatctcggctttattgttatttcattttaatccgcttgtggaaatattagacaatcatcttatagagaatagaataatgggaacggttagatatatatttgaatatattcagagaatagataaataggcaaaaatgtattcgttataattaattaaagaagtaggtaacagtcgttaaaaactttttaatgttaatgataacttaacacaaatagttgaggggaaatatcatttgctcttgtgattgaggaagtctacagataaatgtcagatataggttgagatgtttattagttttttgcatattatgttatttattgggatgatatttcctacattgagcatatgtgttggtatttcattgtgatccgataagtgagttttttatctttttgatttctaaagtcttatgtgataaatgtcactatgcgaaattttctaaattaatgaggatttttttgttaaagctgataatctgctcacaaaattaatcacaatatcttatttttgaatttttttcttgatattaatgggttgttgatttaattaacaatcggctcattggtagaacttcttttacttgtgtgggggctaaagtaacgggtttcatatatgtagcttgttgtgaatcactgcttgttgtgaatcactgataggaggcatagctaaaagtgtatgaagtgactggcgggcaatagtcgattgaatgacatatctattaactatcagtcaaaaacagtacaccaaacattcatttaatctgatggataatgtaaaaaggtcagtaaacattacacattaatttcaaacttgtgttacatttatagcgtttttctgaccagtatctctgtgtttcttaatacagcattgcgttacttgttaattataaaggcatattaaacgcaatgaattctgccggatacgattttatggtcagattgggtttactaatttaaggggaaaaatatcttgactaacttgacggaactaattagcttttttaacagtatcctttggggctccgtgttgatttatcttcttcttggggcgggtatttacttcactatacgcacgggttttatacagattcgccattttgggcacatgttttcagtattgaaaaacagtaaaaaatctgacagtgcaggtatttcatcattccaggctctgtgtaccagtttagctgcacgggttggtaccggcaaccttactggtgtggcaatcgccttaacggcgggtgggcctggtgccattttttggatgtgggtggttgctctgattggaatggcaacctcttttattgagagtacacttgcccagctgtacaagacaaaagacgataaggggaattaccgcggtggtccggcctactatatggaaaaggggcttggagtacgctggatgggcgtgatgttctccatatttcttattattgcttttggtctggtatttaatgctgttcaggcaaattctattgttcaggctgctgctttcgcatttgatttcgatcctttgtatgtcggcattggtttggtgattcttagcggattcattatttttggtggcttgcgctctattgctcgggttgcagaattagttgtcccttttatggcgatagcttatctgatcttggcgttctgggtcgtcgggcataactttgaacgaatgccggaagtgtttgcattgattttcaaaagcgcattcggtttgcaggaagccgtttcagggaccgttggttatggtgttgcacaggcgatgacacaaggtgttcaacgcgggttgttttcaaatgaagccgggatggggtcagcgcccaatgctgctgcttctgcttctccatatcctcctcatccagcatctcagggttatgtgcaaatgctaggtgtttttatggatacgctggttatctgtagcgcgactgctgttatcatcctgtcatcgggtgtacttgatggcaatatttcaggaataagtggaatagaattgactcagcgggcattgtcttccgctgttggtgattggggatctgaatttattgcactggctatcttctttttcgcattcacatcaatcattgcgaattatgcttatgctgaaagcaatattgtattccttgaacgtaatcataccgcgggcttgatgatcttacgtctggcggcgttgggtatggtgatgtttggtgcgttggctgaattgcctttagtttggaaaatggctgatttgtctatggcattgatggcaattaccaatctgaccgctatcttgttgctttctggcgtcgcatttaaactcgcaaaagattacaaccaacagagacgtgtcggtaagttaccgacatttgatattaatcagtatcctgaaattcagaaaaaggtcgaagttggtatttgggaagaaacggcaagtcttgccaaatcgaaccaagtggctggccacaagtgaaatgctagaacaaagtacataccctatagatttcaagctgcatcgcgacggcaagggagtgaatcaccgggagcatagagaactatgtgaccgggggtgagcgagtgcagccaacaaagaggcaacttgaaggataacgggtataaattatgggaataaggcatcttcatttgtgctttatgtcaagaacaaaaccgataattttataaaaaaatcatgtaaaacataaattttattttgtattcatttgatttctttgtgttattatattgctattcaattaataggtgggacagggaaatgatgaagaagatcatattggttggcttatttatgctattggcggggtgttccagtctggaagatcggggtgcttataaagttgatagctcttttccttcacaaggtcaaaatgacagagtaaggtttttggtgttccactataccgctgtcgatgataaagattctttacgtatactcactcagggcggtgttagtgctcattatttaatcccatcgttaccgaattatgtgagaggaaagcctgttattctacaactggttcctgaagagaagagggcatggcatgctggtgttagtggatggaatggtcggaaagacttgaatgacacttcgattggcattgaaattgttaataaaggatttacggaaatgctacttgagaaagagtggtatccgtttaatgagcagcagatcgatctattaacgcgtttggcgaaagatattattcaacgttatggcattgaacctattaatgtcgttggtcacagtgatattgcacctttgagaaagtatgatccaggcaaacttttcccttggaagaatttggctgagcaaggtatcggtgcatggcctgaagatgcaaccgttgaaaaatatatggctggcagaaaatggcatgataaggcttctgttgagttaattcagaagacattggctaaatatggctacaccattccacaaacgggtgtacttgatgaagatacccgtaagaccatcagtgcattccagatgcatttcagaccagatgacatcagcggtaaccctgatgcacaaactgaatcaatagctctggctttggttgagaaatataaaaaatagtttttagtatcttatgagatcgtgccatagaaagaactttattggagtgactttatatggcatggtttttctcattagcctatacccgtcatctttcaagttgcctctttgttggctgcattctctcacccggtcacaacgttatccatgctcccggggattcgctcccttgtcgtcgcgattcatcttgaaatccataaggtatattactagtttaagtaatagtcagattgaatgaaatttttgcaatatggcgagaatattactctttattatgattttttcctccaggcagaataaatgcaagaataatcccaattaggctaataagaggtgaatacattattattttttcggaaaaatagtttggtaagacgctgcacagatagataaaaatagagattaaccagccatataaccccacgtcattaaatctgtaagctgttttcatgattaaatagtaaatcgtagcgaaggagcacattgcccataaaccaatagagatcatgtacagccacactgataactcatattgcatatgggcggcataattattttctgctaggtaaccagagagaaagattaatattccgaaaataaccgctattttaataaaactaataatataatcttttctactcaatttttgactgaaatagcttttcattgcactaactggagaatcgtccataaataatggtcaggtaaataaaaatggagcagataataactgatctagtgatggtatgaacagaaaaatatcagtcagatattatatgagaatatttaaaacgtaattttaagataaatatgtataaataaggtgatgattgttaaattatatgatatacccgttatctttcaagttgcctctttgttggctgcactcgttcaccccggtcacatcgttatccatgctcccggggattcgctcccttgccgccgcgatccatcttgaaatccatagggtatagtttgtgttgtttatgatctttttggtgtttaacccattctttgaggacttgacaaatgattattcgcttatctaagactttgatgatttttgcaatagctttgtttgcgacattagcggcttttggcaatattacagactatgcgactaatttcgcatttgtacagcatgtattaatgatggatactattttcccagatacaactattacctatcgtgcaattcattcaccgttgctacaccacattggttatattgtcattatttctttagaaactttaacggcagtgttatgttggattggcggtattcatttactggtaaatttaaaatctaatgctgctgtctttaataaaaagaaatctattgcgatagttggtttgaccttgggattcttgacttggcaagtggcatttatgtcaattggtggagaatggtttgggatgtggatgtccaaacaatgggatggtgtgtctagtgctttccgtttttttatcactatcattctggtattgatttacttaattcagtatgacaaagaacaagaataagaatataccctatggatatcagggatgaaatatcaaaggtactgacatcagggttgtccgtttttcaaattcatgttaacggaaaccaagtgccgttaaaaaattcgacagagctctctgtccatctaatcatgaaacccagagagccttgttaagggaagtatgatgtctggcatcaaataaaaggtcagaacacaaaggttgaagctctttgtctttcgccggaaagcacagttgcattggttgggtaattgcccgtttcaatgttgttctctaggttatcgtgtcatgaacagtgagtagtgaaatgcagcggtaatttaacttcgagctcaatctctggattctgccggaaatcatagggagttatgccatactctttgcggaacatataagtgaaatgagattgagagccaaagccgaaatctaaggcgatatcaaaaataggcaacgcgctgtttcttaaaagatgaacagcgccagccaggcgtcgttggcggatatatttaccaagagaaattccggtgacttccttgaatattttctgcatgtgccaaagcgagtaaccggagtaagttgccagttcttccaggtggattacccggccaaggtgattctcaatccatttgctgagagcacatacaagtgctaagtgattatcctgtggcattaacaattttgttctggttgaaagtggaaggaagtatacacaactttttctaaagatgacaaagccttgacataacgatttaaattgtaactgaatgtgacaattgatttttttgttatagtgaatagaatccacatggttagtgtttgtttaaatgcgttctgattacattgttagcatgcatactgttgctggttcgattttttcacaatgaaagcacaggatgaatatttttcttgtttcattgctgtaaaatatcatttcccaactttattcttaacgtattgcgttctgaccgaacttgaaggaaatagaattggacataaaaaaaaccattgcaatcttagcattacttggaatatgtctgttcttgtacctgctagctttggatagctattgtgatcagggggaacagtttgattcaggtatttgttctgtgactcgatatctgcctttctgattagttgctgatactcatcagccattttcccgtcatataatatatctgtgctaacatatatacccaatggatttcaagatgcatcgcgacggcaagggagtgaatccccgggagcatagataactatgtgaccggggtgaacgagtgcagccaacaaagaggcaacttgaaagatgacgggtatatcttcaatatccaccctttaaagctagtgttttgtttgctttgaataaagcagataaggggaagcggttgttttcccactaataacaagatagaagttgtatcaagaggacaagatggcaggacaatcgcagcgctcaacacttaaacgcggtttaaaaaaccggcatattcaacttattgctttgggggggtcggtcgggactgggttgtttctcggtattgcacaaactataaaaatggcaggtccctccgtaattttaggctacgctatcgcaggctttattgcatttctgattatgcgtcagctaggtgagatggtagtcgaggagcctgtagcggggtcgtttagccattttgcatataaatattggggcgattttcccgggtttttatcaggctggaattattgggcgatgtttactctggtcggaatggctgaactaacggctgtgggcatgtatatccactattggtggcctgatattccaacctgggtttctgcaaccatcttctttgttttaatcaatacggtaaatttaattaatgtccggttatatggtgaaacagaattttggttttccatcattaaagtgaccgcaattatctgtatgattgtttttggctcttacctgttagtcagcggaaatggcgggcctcaggccagcattactaacctttggcagcatggtggctttatgcctaatgggatctccagccttattatggcaatggctgtcatcatgttctcttttggtggattggaactggtgggtattaccgcagcagaagcggaaaatccacgtatcagcattcctaaggccaccaatcaggtggtatacagaatattgattttctatattggttctctgacggtgttattgtcgctttatccgtggggcaatgtcgttgaaggtgaaagcccatttgtgatgatttttcataacctggatagtttctgggtggctaacattctgaatattgttgtcctaacagcggcattgtccgtttataacagcggtgtgtattgcaacagtcggatgctgtacggtttagcaaaacaaggtaatgctcctgaaatgctgacaaaagttaatgaaagtggtgtgcctatcagagccattgtcatgtctgctttagcaacgtccattggcgtattgattaattatgtgatgccgggcaaagcatttgagttattaatggcgttggtggtaacaacgttggtgattaattgggtcatgatctgtatggcgcatttaaaattccgggcagaaaaagttaaacaggggatagcgccgtcatttaaggcattttggtatccgttcggtaattatctgtgtctggttttccttgcttttatacttgtcattattttaatgatggatagcatccgtatttcagtcatcctgatgccattctgggtgggggtgttatggctcgggtttttaatgtcccattctcgccgtgataaaatgaaaacagaggagctgggataatatctataccctatggatttcaagatgcattgcgacggcaagggagcgaatccccgggagcatagataacgatgtgaccggggtgagtgagcgcagccaacaaagaggcaacttgaaggataacgggtataactggattatctctattaaagataccaggctgatatgatatataccctatggatttcaagatggatcgcggcggcaagggagcgaatccccgggagcatagataacgatgtgaccggggtgagtgagtgcagccaacaaagaagcaacttgaaagataacgggtatagcctggtattttttatccgattaccattgccagcgtaaccaagcgaagagtacattaccgttgttatatgtgccgggaatgtacgttccttgaaacgataaccgatcatattctatggagaataacggtaatgggagtggaatagggacataataataatcatgacgagctgtaacgctcagagtgaaaccaattcccattcggaaaccctctaaatcaccgggtatccacatcttctgaaagccatagccaacgatgggttccaaacggttatgagaatccataaaagccattgcataaagggaatgccaatcgttgtcttcgtcgtaacgatatttaccatagccgaaaccccaaggccgctcattatatctatcggttttctctttatcgtaggtatgtctgttatgccaagtaattaccggcagataaagttcattgttgggtgcatcccaagtaagagcgacattattattgaatttttcccataaactgctcgaattgttgccataactgatcggtgtgtgagattcaatggttgttaatgatttgttagcagtatttgctgttgttgcaaatactgtcccagatgagactaaaagcgtggctgatagggtacaggctgcggttaaatcaaacttcattatttattgctccaatttcccgacggcataaattggggagatcctttgtatcacgtaaaatatgacaaacatctaaattcaggaattctactcttgctattttcaataaaagttaaacgaaaaattaatattaagatgtgataggtattaactgggtatataaaatactgatattttagttgactaatatggggaatgtgttgattttttctttcactcaaacagtagagatgggtctctatgaccatactatagatatagaaaatctaataataagacaggcaaaataaattagagttatttatgttatctggggttttgttgagtggataaactgtaagctaattaggataaccttgggttttcaaatttttgcagctatgttaaacaataattgttgttaagaattttaaatatgtgcgttagctccatagctgataaaaaatggcttgccatcatattaagaatatgtgataaatcgttcgggtaaacgaggtatggttctgttatacaactctgttaatagcagcaacttgctctagtttttatgttgcgccgaacggcgaattagaattaagtgatccaaaggaaattcttaaaatggcaaaaatcactggtactgtaaagtggttcaacgaatctaaaggttttggttttattactccagctgatggtagcaaagatgtgtttgtacattttagcgctattcagagcgagggttttaaaactttggccgaaggtcaaaaagttgagtttgaaattcaggacggtcagaaaggtccttcagcagcaaacgttacagcagcataacttctttttgtcaatcattttggattgacgaagtaaatttgttgtctgtttgattttttattggcaacaatgacataccgatatcaccctgttagttatctgatagggtgtttttgttttgacttggggtgcttttcacagagtatggatttcaagatggatcgcgacggcaagggagtgagtccccgggagcataggtaacgatgtggccggggtgagcgagtgcagccaacaaagaggcaacttgaaagataacggatatacttgcttttcttttgctggttggaagggtagctataatgagaatcaattcactgacaattgccggtactgatcctagtggcggtgctggcattcaagccgacctaaaagctttctccgcacttggtgcttatggcacaacagtaatgaccgcgcttgtggcgcaaaacacctgtggtgtgcaatctgtttatgatatcgatcctacttttgttgcggcacagcttgaatctgtgctgtcagatatcagaattgatagcgctaagataggcatgttatccaatgcggccaatgttgttgtcgttgccgatgcaataagccgttatgccgttccttatgttgtattggatacggtaatgattgcgaaaagtggcgatccgttgttggcaccggaagcggtttccgaggttgttgaacgattattaccgaaggtttcgttgattaccccaaatttgccggaagccgccgtgatattgcaatgctctgtagcagaaactgaaacggacatgcaaaaacaagggcgtgaactattatcgctaggatgcgaagccgttttactgaaaggcgggcaccttacagaacatgaaagccctgattggttatttactgctgagggagaatggcgttttactgcgccgagaattaatactcgtcatactcatggtacaggatgtacgctctccgccgcactggctgctctgcgtccgcgttattcgaattggcaaacaaccctgcctgttgccaaatcatacctccaggcggcgttagaacaggcggactcgttagaggtaggaaaaggaatcgggcctgtgcaccattttcatcagtggtggtgagagtagctgattggcgtttttgggatttgatgagaaagtgataatgaattaagaagaataaggtgtttatgctgtgagagtagtatataccctatggatttcaagatggatcgcggcggcaagggagcgaatccccgggagcatagataacgatgtgaccggggtgagtgagtgcagccaacaaagaagcaacttgaaagataacgggtataactcaacattggtagcgacttactatctattcattatcaccggcgacaagtttgatttacgctgacaagcttggtgcttggtttacgcgatagtcacttgcttatccagatagacatcttgaaccgcattaatcagctcaataccctctttcatggattttttgaaagccttacggccgaggattaaccccataccgcctgcgcgtttattaatgacggcggtacgaacggagtcacttaaatcattattaccggatgcaccacctgagttaatcataccggcgcgacccatgtagcagttagctatctgataacggaccagatcgataggatgatcggtagttaaatcagtgtaaacacgtttatcggtatgaccaaagccaatcgccgtatagccgccgttattttcggccattttttgtttaacgatatcggcaccgatagtggctgctaaatggttagcctggcctgtgaggtctgcactggcgtgataatctaccccctctttcttgaaggcagaattacgcaggtaggcccacaatactgttaccatgcccaattcatgcgcccgtttaaaggcggctgaaatttcctcaatttgacgccgtgattcaatagagccaaagtaaattgttgctccaacggcgacagcacccatctcgaatgcttgttcaacactagcatataaagtttgatcatattgagcgggatagctcagtgcttcattgtggttcagtttaaccagaaatgggatcttatgagcataacgacgagaaaccgcggataacacgccataagtagaggcaacacagttacagccggcttcaatagccagttcaacgatattttttggatcgaaatagagtgggtttgctgcaaaagaagcggcagcagaatgttctacaccttgatccaccggcaaaatagacaaataacccgtacctgcaaggcgaccatgatttaacaatgtttgcatggagcgcagaactgtattaggtcggttattgtcgatcattacgcggtcaacaaaatcggcaccgggcagataaagattttcacttagaatggtattacaacgatgttgcaataaactgtccgcatctttgcctaacaacttagcgatatcagtcatgttttactccagttatgaaaagatactatcgattgtcatttatcctttttaggataacaagttatattgggggggaagtggtagtggatcgcttcaggtcggactttaaagagtattttattatctggaaagtggctatttagcgaaaaagtgacattaccattcctttaaggagtatggaggcgaaagcgtaagatctttatgtgctggattatatgttctcatcattcttatcgtttgctaacaaacaattttctaggataagataaataggtgtatgagatttaatactgataaagaataaattattcactgtatttataatatagatattaatttggcattgataaattgaaatatcaatatagttaaatatagttaaatatagttaaatatggttaaactgctcgtctttattgaacttgttaatattttattggcttttattattcaacaattaaatgtttttatcatatatttgagatatgttattgtttctatggaattttttcattgttatttttttgttaatttataccttatggatttcaagatggatcgcgacggcaagggagcgaatccccgggagcatagataacgatgtgaccggggtgagcgagtacagccaacaaagaaacaacttgaaagatgacgggtatatagcattacaatgttgttaggtggaattgataataatactgagtgtttttagagtaaaaactaatatggatttatcattttaataaataactcattgattaatattgaattattttcctggttcaattaaccggataataaagtcagtctttatattttctctttttatagctaaactgattatttattatatggatttttcacaaagacataatgtgtttttctattatttttatgaattttaaaaaattatttttcatatttctttctctctattgatatgaatttaattgattttaattattcatatgaatgattttttattttgtcaatttattgataaccaagttgcggtattatatatgataaataaccatttttgacgtcaatgttttttaatctacataatcctgtaagcaacagtcaatatggttatttattctttcgtaaaaatgataatagtataaaataataattatactaaatttttagttttgccttgtattcatcaattaattaattgattagaaaatatatcaatataatttgatgttatcacagatggaaaatttctcatgtttttattgttaatagtgacatttcggtttcttccatttaccaagagtaatttcttattacatttcttctgtagtaacttgtttgcaaacgatattttataaagttattggatctattgatacagggtgagagcttgatagatgaaggttgaatgcttatcgcggttacttgctagtctgatttttcctgatgttattgttagatggtatttttcatgcttgctccggtgtaaaaatgcgtttttattgtttttaggtttagcttttaggtttagttttttggtttactgagtggctcctattgtgggattaaatttcatctttatggaagggtaacatgtactgcattgttgtttatcagctctggggtggtttggctatttttcccttgctcatattgtgggtatataaaacagaatccattttgggttgttaagtgggtatagtcaggtaaatgttgaactaatagttttaacaataagtaaattgtaattatctgttttcataatcttcacctgattaattctatcaaattgtataatatttggtctaaatatgatggatttcctgaatgattaaacagtggaaaattttaattacatttctttagatagtgtgatatttcaataagtagaaatattttcttattaatatgtagggtatcagaaacacatgaatataaatattcattgatttaatagttaaatttctctatgtaattaatcatgtaaatgaattctgtaacttgttgattttatttcccagagcaaaaaagaaaaggccagctcaagggagattgagccggccaaggaggtggttcctagtcttactgtaaaacttttttaattttttatttttcaccaacaatactacggtaaataaaatagtattgatgtgatctgtttctaaaaaaagaaatatatcatcgtcaggaggggatattgatgattatttgtctgagtttcggttcgtttgaggatattgagaattaataccatttagattacgtattaataaggcgtaattaatatcaatttgtttaggaattggtaaatagacaatatacccatccccaggcgcaacttccattggttggccttttttatcctgcattgtttccagtgtaaactggatattgcctgatggtgtcattaattcgagacggtctccgatcatgaatttattcttgacagccacttcagccaatccgttgactcgctcacccgtaaattcaccaacaaattgttgggtatcggatatcgagtaaccgtattcataagtctgataggcatcatgggtatgacggcgcaaaaatccttcggtatagccgcgatgagcaagtccttctaatgttgttagcagcgttggatcaaaaggtttccctgcaacggcatcatcaatggctcggcggtaaacttgtgctgtgcgagcgcagtaatagaaggattttgttcgtccttcgattttcagagagtgaacgcccattttagttaatcgctcaacatgctcaactgcacgtaagtctttggaattcatgatgtaagtaccatgttcatcttcgaaagctgacatatattcaccagggcgttttgcttcttcgaaggtaaatactttatctgttggtgtgccttttcccaatgttggctcgatattttttgtcggtatcggttcatgcatatgcacaatattaccgatatcatcttctttgccttcttggacatgatattcccaacggcaggcattagtgcaggttccctgattgggatcgcgtttattaatatagccggataataggcaacgaccggaataggccatacacaatgccccatgtacgaaaatttccagttccatatcgggaacctgctggcgaatctcgttaatttcatccagagaaagttcacgggaaagaataacccgcgttagtcccatttgttgccagaattttactgtcgcccagttaaccgcgttagcttgaacggaaagatgaatttccatttcaggaaaagcttcacgaaccatcataatcagcccgggatcagacataatgagggcatcaggtcccatatcaatgacaggctttagatcacggataaaagttttcaatttggcattgtgaggagcaatattgaccacgacgtaaaagcgtttaccaagctcatgagcctctttaatgccgagtgccagattttcgtgattaaattcattattgcgaacacgcaggctgtaacgtggttgaccagcatatacggcatctgcgccataggcaaaagcatagcgcatattttttagcgaaccggcaggggaaagtaattctggagtaaacatggttaaaaaattctcggtttgagttgagatgagttttcactataaaaagtaaggataaggccggggattctaacgcgtattttgttgcggatacaaatttattagtatgaaacgttcggttctcttgatcgatggagagcgccttatcaattgacgatgactttcaactgataaggtgcggtttatcatgaaaaaatattattctgactttgttagatctcgaacattgacgctagagccatgtttaatcgcagattgaatgccttttttgaccgcgacttcattatcgtaagactcgctgatgccgataacttgatagtttctcgctttcagcacgaaataggacttgccagatttgttttctctgatttcgaagtttttttctgccggtgaatttgcttggacagaacgaattcctttattcgctgctgccttggtcgtatacatttcactggtaaggataacttcaccgttcgatgcttttaaattgaagtaatactgcttgttttttgttctcttaagatcataatgacccacagccataagaaattcctccaattacaggtaagtatttttaatatagctgaatttctgaccggtgaaaggttgagagaaatttaattcagttaaagtgtgacagttataacaaacggcatatatctgcttcccatcggtaaccaagtccataaatagaacgaatgaatgttttactgttatccaattgttccagtttacggcgtaaatttttaatgtggctatcaatggtacggtctgtcacgattcggtgatcatcatataggttattcaataacttatcgcgggaaaatacttgcccagggcgacttgccatcgtttttaataaccggaattcaaccggggtcaaatccagtattttatcgcggtaacgcgcctggaaacaggcttcatcaatgtgtaaatcgctttgtttgacaatatcttgtggtcggtaacagcgacgaagaatcgttttaactcgcgcgacaatttcacgtgggctgtaaggtttacaaatataatcatctgccccgatttccaatccaagtaaacggtcaatttcttccgttttggcggtgaccataataatcggtacatcagagaagcggcgaatttcccgacaaatagtgatgccatcacagcctggaagcatcaaatccagcaaaataatatctggattatgttgctgtacatgggagacagcttcatcacctcgcagtagccactgggtttcgtaatcagccgcctgcaagtaatcaaccagcaattgcccaagttttggctcatcttcaacaatcaaaacagtataatgctcaaattctgtactcataacgtttcgccgtcgagggattcagtgagcgacaattctacgataattctcaggccacctaaaggtgagggttcggcatggatcgtaccgttatgggcttcaacgatgttatagcaaatggctaaaccaagtcctgagccaccactggcgcggtttcgtgaggattcactgcggtagaatcgttcaaaaacccgttggcattgctctggtgacaaaccgggcttgctgtcctcccaattcagaatgaagtggttatcgtcagaacaacctttaatgatcaattttccattatcagcggtatagcgaagactattttccagtaaattatgaaatagctgagtcaatctgcttgggtcagcaaacaacgtaatcatttcaggaagtttaacatccacttggatttgtttatcaaggaaacggccatgataagatgcgatagcaacctgaattaactcactgatgttgataaattctttccggtatgccagcgccccgcgatcggatagagatagttgatgtaaatcatcaaccagtttggtcaatgtggtaatttcagccaataacgaattgagagtttctggcgttggtttgtgaacaccatcctgtaacgcttccaattcaccacgcaatatggaaaggggagtgcgcagttcatgagaaatatcggccatataatcgcgacgcatctgctcgtttttttccagggtactggcgagttggttaaaattgtgggcaagctgaccaatttcatctttacttgatggtgtgactcggacactaaaatcaccggctgccagtttatgtgttccttcaaccaaacgtttaacgggttttaacataccgcgggataataatagcgtggctatcattgccagcaaggtagataaaccggcaattatccagcttgtcagttgttgctggcgatcaaaactgatatcagcttgacgggtaattttatctgatgtgctaacaatgacccaaccaacgacttgatgatgatagataatcggtttgcgataagtctctgacgggattttaccttcatgaccgaccagcagtttcatgtcactgtccaccacccaaaattgagttcgccaaccgcgaggtggtggaccttgacggctttcactggtttgttcaatggagcggatgatttgaaaaattgcccggtcattcctctttaagaatttccagttgccatgttgttgatattgttcagccagtgcttcggctaacatggcagtacgtagctggatattttgttttatataaccaataaaaccatgctggaagctgcttcttacgccccagtgcatggtgatgagtactagcatgcaagtggcgaaaatggccataaacagtttaccactgatgccgagtttcatgatggctccataatttgcttggtagtacgccgttgttgccacttttcccttactgcctattccaatagggctattttatttgccattttgaacctgggcagtgctcaaaatcctcacgtactacgtgtacgttccggtttttccgcgctgtccgtgttcaaactgcctgcaacaattacgcctattgggataggctcttagtcgatcaaaacagagatagacaaccggtgtggtatatagtgttaaaagctggctcataaccaaaccacccacaatggtgattcctaaaggttggcgtaattccgtaccgtcgccactactcaaaaccagtggcagggaaccaaacaaggcggccagtgtggtcatcagaatcggacggaaacgtaataggctggcttggaatatcgcatcacgggcgcagatattaccgttacgttgagcttcaatcgcaaagtccaccataataatggcattctttttcacgataccaatcaataacatgatgccgattaatgctatcaggctgaatggtgtgtcaaacagttctaatgccagcagggcaccaataccggcggaaggcagggtagagagaatagtcaatggatggatataactttcatacagtatccctagcaccagatagacggtaataatggccgccagaatcaagaataattgtgatttcagggtttcctgaaaaatctgggcggtgcctgcaaaagtgccacgaaccgttgaaggtaccctaagttcggttgtggttctttcaatcgcattgatagcatcagagagggtatagccttcgggtacattgaaagcaatggttgaagcagcagaaagcccttgatgattgacacttagcggcgcgttagccggttgccagtgagcaaaataggagagcggaatggcttttccttgattattaatcacaaacattttttccagtgcgctgacatcctgtgtatattctggtgcaacttccatcaccaccttgtactgattaagtggttgataaatggtggatatttgtcgctgaccaaaagcattattcagcaaattattggcttcactgacattaatgcccagacgagacatggtatcgcggtcatagattattgccatttcagcgcctttatcctccttatctgaattcacgtcagtcagttgcggcaattgccctaatgctttacggataacaggctcccatttgcgaagatcattcagatcatctgccagcaatgtgaattgatagctggcattagcctggcgaccgccagccctgatatcttgtaccggaatgagaaatagatttgctcccggttcattggcaagtttaattctcaggcgcgagataatctgttcagcgttttctgaacgctctttcaatggctttagagagataaacataaagccattatttacccgcccaccaccggtaaaaccgataacgctgtctaccgtaggatctgcattgattgtctgcatgaagtttttcattttttcacgcatagactggaaagagatactttgatctgcccgaacaaaccctagtaaccgaccggtatcctgctctgggaagaaagttttggggatattgatatagagccaaacatttagggcaatgatgccggccaaaattaacaatacccaacggctatgattaagaacccacatcagggagcgcccgtaaacttgctgaattttcagtagaactttaccgaatcctcgtattttcttctgtgctttgggacgctgagattttagtaaatgagcgcacatcattggcgttagtgttagagaaaccaataatgagatgctgattgatgtggttagggtaatggcaaattcacggaacagccgaccaaccaatccatccatgagcagaagcgggataaagacggctaccagtgaaatactcattgagaggaccgtaaaacccacttcccggacaccctgtagggccgcttgcatgggttttatgccggcttcaaggtggcgggaaatattctccagtaccacaatcgcatcatctaccacaaatcctgtggcaaccgtcagcgccattaaggaaagattgttcaaactgaaaccgcacagatacatagcggtaaaggtgccaatgagtgaaaccggtacagcaatggcagggatcaatgttgcgcgaccagaacgcaagaacaggaataccaccagaatgaccagcccgatagcaatcaccaatgctcgttctacttccactattgaagcacgaatagtgggtgtgcggtcttgagcaactttaagttgaatactggcaggaatagattcatgtaatgcaggtaattgttcacggatacggtttactgtggcgataatattcgcgccagcctcacggcgaatgatcaacaaaatagccggctcaccgccagacattccggctgctctgacattctgaacagaatcttttacatttgctacatcctgcaatcgcaccggtgaattgttgttgtagtgaacgatgatcgggcgatagttttcggctgtttttaactcatcattcatttgaatttgccagtgttgctgctcggaatccacatatccttgtgggcggcgaacattggcattgctgatagctttgcgtaccgcatctagcgaaaccccctgatgaaacaggacgccaggattcaattcaactctgactgccggtaatgaactgccgccaacagagacttcactgacgccttcaacttgggcgattttctgagccagttgagtagaggcaaaatcataaagctgcccctgattataggtatcggaagtcaatgtgaggatcatgattggggcatcagtcgggttgactttgtaataatgcggccggctaggcatacctgaaggcaacagactttgagcggcattcagcgctgcctgtacatcccgtgctgcactgttaatatcacgattgagatcaaattcgagcgtgatattggtactaccaagggagctactggaggtcatttcattgactccggcaattcggcctagggcgtgctccaatggcgtcgcgacagatgaggccattgtttccggtgaagcgcccggtaatgaggcgtaaaccgagatcaccggaaaatccacttgtggtaaaggagaaaccggcaacagggtaaatcccaataccccacatagggttatggctaaactcaatagcgtggtggcaacagggcgttggataaataaggcaaaaaatttcaccgcggctcctgatgatcaatagatggcgtgtttgaaactgagagctggcgattgcggcgatagtgggccagacgatcaaacagcaaatagatcactggcgtagtaaacagtgtcaggatctggctcataatcaatccacctaccatacagatacccaaaggacgacgtaattcagcaccgacaccggtgctgagcatcaaggggagtgccccaagcaacgccgccattgtggtcatcagaatcggacggaagcgcaataagcacgcttgataaatggcttcgtaaggcgatagtccctgttcacgctccgctgccaacgcaaaatcgatcatcatgatggcgtttttcttcacaatacctatcaacaagataatgccgatgatcgcaatgacatccagttcatgacctgccatcatcagcgctaatagtgcacctactcctgctgttggcaatgtggagagaatggtcaccggatggatgaagctttcatacagtatgcctagcacgatatacatggcgataatggcagccgcgattagccacaatgtattacccagtgcgctttcaaatgccagtgttgttccttggaattgggtggaaatgtctttgggcatgttgatcaattgcgcggcatcacgaacagcattgaccgcctgttcgagagaagcatcctcggcaacgttgaaagaaaatgttgctgagggaaattgagctaggtgattgattgccagtgggccaaatttttgttcaatagttgcaatagttctgagaggtacgacatggccatcagttccgttaaggcggatgttatcaaatgctgccagccccggagtcgatgttacatcatgttccaagatgatccgatactgattagcttgcgtataaatggttgaaattagccgctggccgaatgcgttatagagtgcgttatctatagcagccattgagatgcccaatcggctggcaatgtctcggtctactttaacgtaggcgatcagcccctgatcttgccagtcactgctgatatcaactagctctgctctctgctttagttcagccagcaattttggcacccagatactcagttcatccagagaggttgcctgcaaagtgaattggtattgggtacgggtaacctgagtgtcaatcgtcaaatcctgcatcggttgcagatagagctttatgccgggtatagcggcaactttttcctgcaaacgcggaataatgtcaacgattctgtcatcacgctgattgagtggttttagtgtgatttgcagtcgcccgttattcaatgttgggttactgccatcaacgcccacaaaagtggtgatattttctactgccgggtcttgcagcaataaggatgaaacctgttgttgtttattcaccattgcggtgaaggaaatggattgtggcgcttccagtgttccctgaatcagcccattatcctgtgatggaaaaaatccttttggaatcatcagatagagcagggcagttagcgccaatgtacttagggcgatgccaaaggtgatccacgggtgattcagtgctctttttagccatacagcataaccggcaatcatttgttcaaaaaatcgtccactggcttgttcaaaacgattgtgttttatctgtgattccggtttcaggattcgagcgcacatcatgggggttaatgtcagtgagacaacggctgaaatcagaattgccacggccagggtaattgcaaactcacgaaacaggcggccaacgatatcgcccataaaaagcagcgggatcagcaccgcaatcaaagagaaagtcagggagataatggtaaaaccgatttcacccgcgcctttcaatgcggctgtcatcggtttctcgccttgttctatataacgagagatattttcaatgaccacaatggcatcgtctacgacaaaaccggtagcaatggtgagcgccattagcgtcagattattgacggagaaaccgcagaaatacatcactgcgaatgtgccgatcagtgaaaggggaacggcgatactggggataagtgttgcgataccgttacgtaaaaacagataaatcaccataacaaccagtgcaattgccagtaatagctcaaactgaacatctttcactgaggcgcgaatggttgttgtgcggtcagtcaggattttcatatcgacggattttggcaagctgctgatgagttccggcaacatctggcgaatgttatctgtagtttcaatcacattggcacctggctggcgctgaacattaatcacaatcgcttgtgtgttattggaccatgcacctagtttggtattttcagcgccttgttcaatggttgcgacatcttgtaaccgtaccggtgagccatttttataggcgatgatcaagttgcggtaatcatttactgacttcatttgatcgttggccgaaagcgtgacagagcgagtcggaccatcaaggctacctttggcggaattaacgttagcattgttgatagcggtgcggatggtttcgctatccaatccctgtgcagcgaccgcttgggcatttagcttcactctgacggctggtcgctggccgccggcgagtgtcaccaatcctacaccgttgacctgtgaaattttctgcgcaatacgggtttccaccatatcttgaatctgtgtcattggcattgcatcggaggtgactgctagcattagaatcggtggatcagcgggattaactttgctgtagatagggggataaggcaggtcattcggcaataaattactggctgcattgatagccgcctgcacttcctgctcggcgacatctaacggcaaagttagctggaattgtaatgtgataacagaagccccgccggaactttgagaggccatctgtttaaggccagacatctgtccgagttggcgctcaagtggtgcggtgactgccgaagtcatcacatcggggcttgcaccggggtagagtgtgacaacctgaatggtgggatagtccacttccggtaatgcagacacgggcaacatgcgatagccgataatacctgctagcaggattgctgccataaacagagtggtggcaacaggtcgtaagatgaacaggcgtgatggtccgccacctgggattggggagcctgcctgcatcaggaattctccgtttgatcgtgtttttgtggttgaggcttatttaccatcggtgtgacaatatccactttagcgccatctgtcaggcgatcgataccatcagtgaccactttatcacctgctgctaagccggcactgataacaacacgttttgtatcctgcaatttgaccgtgaccagatgtttgctgactttattctctttacctaacatccagacaaaattcccttcattacccatttgcagggcagcatttgggatcaccactgcattttccagtgtatcgactttaatacggacattaacaaactgatttgggaataagatgctttcttgattggaaaaacgggcttttagcttaattgtgccggtagtggcatcaatttgattatcaatgctcaacagcttgcctgcggcaagttgttgctgattattgcgatcccaggcactaacaacgacgtcatgattcgttttctgagcttgtaaaacagcattgatatcgttttcagggagtgaaaacagcacatctaccggatcggtttgggtaataaccacgatagaggagctgttaccactggaaataaaatttcctacatcgatctgtttcaagcccactttaccggaaatgggagctgtaatacggctgtaagtgagttgaagttttgcactatcaattgcggcttgatcaactttcagactggcttcgtgttggcggacaagtgcacgttgattatccatttcttgttgggaaatcaggtgagtgtttgccaatttctggtagcgattgagatcctgacgagcattcgccaatattgcttcatctttagcaagctggcctttggcttgcgctagttgaacctgaaaagggcgtggatcaatttctgccagtaaatccccttgtttaatttgttggccttcttgaaagtgcaaagcgataagctgaccttcaacccggctggttaccgtggcggtattggcggcttgaatggtgccaagcccggccagaaagcgagggactgcctgctcttttgctgtggcaacctgtacagggggtaaaggggaatgtcttaaaccagaggattgatccgatgggctcgattgttgaggggttttaagttggtaccagaaaaatatagcggcagcaatggcaatagcggccagtgctgcacggaaaaggagggtacggtgtttattattttgattcatttcttcgacattctctcaaacgcaaggctaagatgttgcttgattatgtccgactgaaatatcggtttaatctcatgctattagtttagacagtgaggataggctaaaaaatggagaaaatgtggaaaatatgtcaaggaagcgctttttaaggcaaattaaggcgttttttgtcagttttttcgagtcggctccagaaattatgcaaatgaggctgcttctgttaccttcgttttctttacggttgtgagattatatcgcttaattttcaagagaatttaaacgggtgataaaatgcaaaaaaatatagtccatagtgtatagaacatattcctgcgaattgtttattgatggtaaattgtgaaatagatcacatattggttatctatctctgcgcacattgtttcttaattctggaaaaaggtcatgtgacttttttttggcggaatttatagattaatgtaaggaatatgataaagggaaataggctatgagacatttcattattgatacagatacggcttccgatgatgcagttgcattatttatggcgctccgtgaaccctcagtttttattgaaggtattactattgttgctggtaattgtgctgttgcgcagtgcaggaaaaatgcattagttagtattgaaaaagcagggacatatattcctccggtatatgaagggatgagtaaaccattatttagagagcattatgcttcatatcatattcatggaaaagatggtatgggtaatatgaatttaccagagtcttcgttaatagtagaagataaacatgcagtagatgccattattgatatcgtgaaaaaatttcctggtgagatagagataatcactttgggaccattgacaaatatagcaatggctgtcttaaaagagccaaatttatataaatctgtcaaagtgatatatattatgggtggctctgggttgaagtcaggtaatattacgccattggctgaattcaatctctattctgatgctgaagcagcacatatagtattgaattctggattacctcttatattttgtggatgggagttaggtatggaggaggcttttattaatgaattcgatatggataaattaaattctttaggtgatcttggtcagtttgcagtgagctgtaatagaacattgattgaattcaatgcgggaagaacgaatagaaaaggatttgatctgcctgatcctataacaatggctattgctttatatccgaatgaaatgatagaggataaattagcggtgtatggttatgttgaatatcaaagcgcacgttcatatgggcatttagtgattgattcaaccgatcttctcaatcatccccataatatgagtgtggtgactaaaatcaagggtgaggtatttaagaataaactatttacattattatcgtaattttagtcatataggagaataaaagatgaattttaatcctgatttactgagaaaggtagaattacatacacatcttgattgtgggttgagttatcatttcgttaaaaaattcattcctgatattacccgtaagtcattttgtgaaaaatatattgccgctgaaaaatgtcatgatttaggtgattttttaaataagatcattccttcactggatttactacaaaaaagggacgtaatcgctgatgctgtagaagatcttttcatacaattaaaaagcgataatgtagtttatgctgaaattagatttgcacctttacttcatcttcgcttaggattaaatgaacgcgatattgtagaaattgttttggaagcaatgaaaaattattcaatcaaatatggtatagcagcaggtttaatattatgtacattgcggaatttttcagaagatcaaagtttgagaaccgcatatcttgtcaatgaatattctaattacggcgttgttgctctcgatcttgctgccgatgaggcaagatatccacttagtgcacatttgaatgcgtttagaatggtgttggaaaatggtggaaatattattgcgcatgcaggagaagcgaaaggggctgaaagtgtgcgcgagactattaataaattaaatatttctcgtataggtcatggtgttagaagtattgaagatcgagatgttattgaactccttatagagagaaatatacatttagaagtatgcccgacgtgtaatattatttgtgatatttatgatatttatgatatttatgatatctatgaaaatcatccagttaattttttaaaagaggttggtgtaaatattgggattaatacggatgcccggacagttgcaaatatcaccttatgtgaagaatatctgaggattaatcgatattttggttggcaatatagtgattttattgaaacaaatttgaatgcattacatgcttcattttccagtaatgaactgaaaagtcgattggaaaaggaaataatgagattatcgtagtgaaaaattgcattttattcatctttatgtataatcgtaaaaaatttatattaaatctgtaatctgtaatctgtaatctgtaatctgtaatctgtaatctgtaatctgtaatctgtaatctgtaatctgtaatctgtaatctgtaatctgtaatctgtaatctgtaatctgtaatctgtaatctgtaatctgtaatctgtaatctgtaatctgtaatctgtaatctgtaatctgtaatctgtaatctgtaatctgtaatctgtaatctgtaatctgtaatctgtaatctgtaatctgtaatctgtaaaaagagaataaattgaaagattatattgataaatatcatcttgatagtatttttccagcagaatttatgccaaagttagatgtggttgaaattaagaaaaatacctatcttacacatcagtcatcaatttttactcatctctatattttagttgagggtaaactaaaggttgagttttataatgttaatggaaaattttctgtttttgcctttgctacgcctctttttcttattggagatttagaactttttcatgcccaaggcgataacataattaatactgtctttgctcaggagcgatcagttctgctatcaattccgttagaaacggtaagaatatttggattaacagatgttggatttcttcaatttgtttgtaagcaactcagtaataagctttttgagtcttctttgtttcgaacggggatatttttaactgttgaggataagctaaagcgatttctttactatcattcgaaaagaaatggaactgtgttggtattagagaaaagggaagatttagcatctgttttaggtgtttcagtcaggcaattaaatagagctattaagagtttgaatgaaaaaggaataattgtatcgaagaataagagagttgacattattgattatgatttcttaaaaaaggatattgagtttcaatttgacgctaagtgatgaaaataaaaaatcctatttttatcgctaaatagctgcattgttaacagaatataccctatggatttcgagatgcttcgcggcggcaaaggagcgaatccccgggcgcatagagaactatgtgaccggggtgagagagtgcagccaacaaagaggcaacttgaaagatgacgggtataatggttaaattacgatatgaaattaaagtaacccgattctgaaaaatctttgccagattctttaaaacgttctttcggtagtggataacccaaagagagatacttttcagcgaaatataatgaactttgatgggttaatccgatagaattaaggctgtcaaccatgtttctcggtagattgcatttaatatctttaacgtaatcaatgatagtattttttacaccactgccatctggcattcttatttttggtctgtcaatgatatattcgggtatttttcctctgaatgcttcgcgtaaaatatatttttctatcccattattgagtttgtaagaaaaatccaagcttaaaacataaggcactagtgctgaatccataaagggaactcttgcttcaacagtatttctcatgcttgcccgatcaactctttgtaaatcagtcctatgaagattatttaatcgatatagggagaggtgatggggatcggggtatgttttaaatagatcgtaaccagcaaaaatttcatcactaccttctccacataaagcaattttaaagccaagacggttagcaatataatagccaaagtgagcaatagttgaatcaatcgcatcgatttgttcgaaaaattcaccataatagatagcatcttggatattattgattaattcttcctgagtaaatgtatatataatatgctttatattattctcagtacaatatcgttgggcaatttcaatgtcttttgaacccggtaatccaaatgaaatcgccgtaatatcgtggtgatatttttttgcaagataaagcacgatagtactgtctatgccgccgctaaacataattgacactggcaggtctgtgtcaacccgctttctgacggcattatctaacagtgaatagattttttcttttgcctgttcgacgttatcgctgcttgctgggatagttgtgtcgtagctaatatatttctcactagtcaatccgtcgaaaattgaaccgggttcaacaggtttaatttctgagttaaattcgattaatgattttatttctgaggctacataccagttaccctctttttgggtgtaatagagcggttttataccgacgtgatctctgcctaataagaatttattattcttattatcaaatagaataaaactaaacatgccatctaattttttaataaatgacttgccatagcaaatgtaggcaattagggcaacttctgcatcgcccccatttttaaattgataaccttgtttaattaattcatttcgaagagacttgtaattataaatttgaccattcagaacaagatgaagatcatgttcctgatttgatatgggttgataggctgaatcgcgttcgacaatagcaagtctgttggttgcaattgaaaagttatttctgacaaccttctcattaaatcgagatggatcgccacgatgtgctatttttgacattatagtctgtagcttattttcaatatcatcaataagcctattttctgtattaaaaacaccaccaattccacacataggtaattcctttggttaagagctatcaatgatatttaaacgtcttctagtataggggcagaatattttaattcgttcacattggcacctaatgtagatatttcggcaaaatattctggataggtttgaccaacatgatatggctcactgataatcaggggctcatcacaatgtaaacctattgttgtaagtgccatgattaatccatgatcgtaatgaccatcaacaataacaccgcctttatatccatatggattgccataaataattaattggtctagtctctcttctgatctaattcctattttgtctaattcccgccgaaaatcagaaattctgtctgattctttatagcggatatgttcaatgttatagaaaacgcttttaccgttggcaaacgcagctaatgcagccagtgcaggcaccgcatctggtgccagtgaaccatcgaaatcttgcgcttttagggtgccgccagatcgaatattgagacaatcatccctgatgaagctgattttcgttccactgttaattaaatagttcaccaccgcgccattacctaattcttcctcaaagaaaccgtttagggtgacatcagaattcagtgaggcgcaaagtgcaaggattgccgccgtgctggctggatcagcgccgacgctaaattctgatggaataaatcgactctttcctgtcgtaaagaaattgcggaatttatcatcatattcgatattaatgcccgctttgcgtaaattattaattgtcgtgtgaaccattgatggtgcggtaattgtatcgatgacttttatttgcagatctcgttcgctaatggcacctaagtaaagtagcccacttaggaattgagagctctttctgcatgaaatttcagtgtaattaccgatgtttttatctgatttcatgcttatcggtaaaagtgaatcaggcccaactgcggtgcactgaatattgagtgattttagtgcattgaccatttccaattgtgatcgtgtacccagggagtaactgtattctgtaataaattcagtatccggtaaataaccggctactcccattaatagccgtaatacaacgccagaattacctgggttaaagatgatttttttatcaatttgtctgatatctatgccttctacgattgtccctgtaatatcactattaaatgatgcccctaaacgggaacagtttaatttcattgctgttgtattgttccctgatgccatgttatttattttacttgtaccttccgttaatgatgcagtcagaatggcgcgagttgaagaacttttggaggcaggtaaagttattgagccatttaatgatttggttttgtttatttcgataaatggcggatgattattaccataataattcatatttttttctcgcttttatactgttagctaacttattctagcgccgagagagtttaaggattggataaatccaggaaaaccatcatctaatttatgtatatgattaactgttgttcgttcttttgcccctagtgatgcaataatattggatgcgcaaatccgatgatcatagtaactgaatatttcgatgcctccatttaatggtccgttactgttgatccttattttgttgaaagccccagtatcattaaaaattaaataactttttccgcccatcatgcgtatattttcgttgataataaatgcgcgttgacatttatgattatttatagcattaagaccggaaaatgtgatatcgccattgccattaatcgctgccgcgataatgttagtggcaacggaaggaagttcatgtaaatagatttcatcggtaatggtgttatgctccttttccaggctgatattaagttcattcttaattgggttatagtttaaattcataccaaattttttatatatgtcaaataatactctttcgttaatggtattaccaaaataataacttctgatagtgattttgcttggtcgattaatacttaatattgacgaagcaatatagcttagtgatgtgaaatcagaagggatgttaatagtaatatcccttggttgatattcagttgaaataaatgtgctacctgttcgagagattttactccccaataatgccatcatggtaattgttatatcgacatatccattcttagtttcaccgttgttgttaatgataatacttttccctttcataaatggtgaaacaagaagagagaatgataggaattgagtactcttattgaagtttaatggtgattgtgatggatatattcttctggaaataatgacaatattttcttttcgcttttctgcaaatacattcaggtatgaaaaaaatgattcatcatacagactttctctgttaaacagtgaatcattgcattttatataaacttccttttctgttagtgatgctaaagcgacactgattctaaataacatgccagaaccgttagcattaatgatcccattacaatgatatattggatgtgcccctttcaatatgatgtggttttcacttctatccagaatttgcagaccaaattgttgtaaagcaataaggagatcttcggtttcagtacaccacgatatattatttacggttgttgtttcttgattcaatagtgctaatagtagcgctctttggatatgaggcttagatgatggtatgactatttccccgttaagagtggaaccggggagcacgctaattttattcatgccaagcctccaggtagatcaattaccattggtattattctttaatttaactatttactatcgatagcaatagttgtaatttcaacgtaatgttctggctttaccattgatttaacggcaatagtcgtattgaccgggcgtatatcgccaaatttctcattaaaggctcgacaataatcatcaaaatgttggaaatctgttaaatgtgttactgtgctgacaacatcagtcagttctgcatcaagctcttttaaatatttctcaattttttctatgataaatagagtttgctcgtaagcattttcccccataacatttccatcaccatccgaagcgacacatcctgcaataaagatctgattaccaactcttttccctcttgagtatcccattttattttcccacggagaggggctaaatactgtttttttaatttcatgagatggcataaatactcctataaatgaaaatatatatacctgttatctttcaagttgcctctttgttggctgcactcactcaccccggtcacatagttctctatgctcccggggattggttcccttgccgtcgcgatgcatctcgaaatccatagggtataagaagattttggaacaataaattaatttaaacagtttattccgttaactaaaaaatatccgtaaatcaatgtagtattaataaaagtatataaagcctgatatgtcaaataaaattgattattaaaatagaataattggttgtttttttattttaaaaatgaataaatattttttcttggcggaaaaattatttttatgaaaaaattcctgtgattatttaattggttatgtattaaagcgctgagtctggttgtattctgacggtttttttatttgaaagtcatcttagttggaactatacatgatgattaggttgtcttaattttaatgaaattttttattattaagtaaagttagataatttcaggaatgaagaaagcatcataaattaataaatatcaactaacgatggggtagatatgagtgtttttatttttattgaagcaagaccggttgaatgctcggcaattgattatattagagatttggggttttctcccgtgttattgacttcaatggaatcaatgaataaaggattatatgatgatttaagaaaggaattatttgataatatttattatgttgatacgagaaatagtaccgatattattaatttaattaaagatacccgtattcctgttgctgcaatcctaggttgctatgatgattttatgattgtggcgtctgaagtagcattagaattcggtttacctcacccggatataaatggtttgaggaatgcatttagtaagaagaatgtcagggatattctggcacaacatggttatgagcaacctgcttacgcggttttttcttataataatattccagaaaatcctaaggttccttttccgtttgtgattaagccacttcgtgatgcgggggcttatggggtatcactttgtaaatctcaagatgattaccaccatgtgctttcagaaatttcatctcatggcacaatgtcaatgctcggtaaagtcaatgaagagttcttgatagaagagttcttgcagggaaatttttatggggcagaattaatttatagtcatgatgaatggcatttaattggtatcaatagaattttcgtttctcctgacgatgacctgtgtatgatcggtttatctcatcctgctgaactgcctgagtttgagtttgcaatggcttgtaagcttgttaaggagtggctagctgctttgggattacggggtggtgcaataaatgtagaatttatttatacctctcgtgggccaatattagttgaaatcaatttgcgcatagcaggtgccagagcggctcaacagatattcatgacctctgggattaatatggtcaaatacttggtcgattttgtttgtggtatcgaaagttctatatcaccagcgtcggaaatagtttatccatttgtcgctgatgcatttgttttttatcgtggtgagggggttgtcaatgatatcagaatagatgctgatatcccttatttcatctccgcagggtttaagaaaacgccttttgctatttcattaaaaagtaaaagttcatcgaaaaataaaaactttggttctattgtcggttatgttctggcttatggtgatagctgtgaggaagcgatggaaaatgcgacacgtattgctaatagcgttcagttaataacgaattaatgagagattatcactatggcgattctgatggggttgatttcagcattatgttggggaagtacggattttttggcagggcaagtcgcaagaaaagtcggcgttgctaaatctttattctatagtcagctatttggtttttttgttttatcgttgttgctgtttttttattttgagatgtcgtttgttaatgcaagcttttttcaattgaccctctgtgttgttgcttcggtttgtaatttaatggcaatggtgtttctgcttaaagcattatcaatcggtaaagcttcgattgtcgcgccgattgtttcgctttatggtgcggttaccacgattttgtcactgataaatgggaaaccaatgaccgttttggttttgtttagtctatttatttgtgttattggtgcctgtctaaccagtatgccgaaatcaaaagatggacaacgagaatcatctggttcaattttctttgcacttttgtcttcactgatgtttgggttaggtttctggctgcaaggggaatttgctgttagagatctgggggttatcaatgcattatgggtttactatttaaccgctgtggtggttttatttctcacgctattaaaaaaaggaaatttatcattaccgccgatttcaattattgctctggttttttcaattagtttctttagtctgattgggtttgcttcattagcttacggttctgctacgggacatgttgccgttgttaccgttctgagttcattggcaagtggcgtcaccgcgttattaggtttttttattcgtggagagcggttgagccgcattcagtggatgggtattgtgataattatagccggtgtcattcttttgaaattatgacatttatacccgtcatctttcaagttgcttctttgttggctgcactcactcaccccggtcacatagttatctatgctcccggggattcgctcccttgccgccgcgatgcatcttgaaatccatagggtatataatagcttgtttccccgaagaattcgggggaacagtgaggtaatgacattgattaatgataatctgcattaagttgattatttcatttgatgattttcacctttctctattatgacctttttattttgctgatgatgctctaatgccgctatggatgagtaaatgaaacggctaaataaaatcagaaaatggtttggtatctttatattgattcctcggctatttctaattgccaacccgtaacgttatgccagtaaccttgctctttttccagatcaagctgcatcagggtgtttgctgataaatagttgtaaggcaggtagagcgcccaatgactatcatcagtaactagtctgagtgattcagggatggttgtggattggcgttgattattgagtaaagttgccagacgtaggatttgaattaatggcagatactgttttttcttgaataaattgaatcttggcaaatcatccagttttatggttttacgatgacagcgaactaaggttgccagcagtaattgctgttcctgattaaagccgggtaagttggtgttttgcagaatataggcagagtgtcgctgtaatccgcttaagttaatacttaatccaacttcgtgtaacattgccgcccagtgtaaaatcgcttcgagttgtggttgcactagtttagggttctggattgcccactgttggtaaagtgtttcagtcgtattaagtacacgctttgcctgttctcggtcgatattatagtgctcagccaggcttcttgcggttctctggcggatatcttgatgacggaaacggccttccatttcatataaaacgccttcacgtagcgcaccatctgagagttgtaatgcttttatatgcagggtatcgaatataccgcataagatagccaaaccaggaataaaaaagtgtttacgatcatccgctagtccgggtaagtcgagggtttttaatttcttgaatttgagtatttctttgaccaacatctccagccgttcaggggtgattaatccgtccttttcccccatggcgaccagcacttcatacaccgctttaatggtcccggatgccccaagcgctgaattccagccagtgatgcggtactgccatgagagattttccagtttttgtgcagcttcaagccgcgctcggcggaatttttctgcgctaatttcgtcatcaggaaagaattggtgggcgaaactaatgcatcccattcggcggctttctaccaataatggttcaaaattttcaccaatgaccagttcagtggagccgccgccaatatcaatcaccagtttacggtttttttctggttgtgtatgttctacccccatatagatcagacgagcttcttcatggccggaaataatttcaatcgggtaggggataacctctttagcgcgtttaataaattctttggcattgctggcttcacgtaagctgtgagtgcccaccagacaaacgttatcagcaggaaagccttgtaaccgttcagcaaataaagccagacaggcaagaccgcgtgttattgcttcttcgcttaattgattgttgttatcaagaccgtcggccagatggacccgttgttttaagcgacctaaaatctgaaatgcatcgttgacaattcgtgcgataatcatatgaaaactatttgaacctagatcaatagccgcaatttctattggtctgggcgtcggcttgtcatgtgttagcggcataaattaagctcttggttcaggttgttcgagggcttttagatagtcataaatagccagttgtgcccggattttccgcttattgccccgtagcacataactattgctcagctctttatcgacgtaacgggcttttactgtatcgttgaattgtaattcgagaatatccagtacccgttgtttcaattgtggatcaagcaggcaaaccgcaacttcaattcggtagtcgatattacgggtcatccaatcagcagacgagagaaagactttttcgtctccgtcattagtgaatacgtaaacccgatcatgttcgaggaaacggtcaacgatactggtgatctgaatattttcgctaaatcctggctggctgggcaccagtgaacacataccacgtatcagtaggcgtatttttacccctgcttccgaagcgtcgtataggcggtccaccagctctttatcaaccagattattaatctttaacataatacctgcgggcttattcgcgctggcgttggcgatttcctgtgaaataagctggttgagcattgcgcgggaattttgcggcgaaaccatcaggttttcaaatttgaccgggcggtagggattttcaataaagttgaatacccggcgcacttcgttagtaattttgggatttgcggtcagcaaggagtagtcggtgtagaggcgagcggttttttcattaaaattaccggtaccaatatgggcatagcgaacaatttcttcaccttccagacgggaaataacaaacagttttgcgtgaatttttagtcccggtgctgagaaaataacatgtacacccgcttcggtgagccgtttggcccaatgaatattggcttcttcatcaaatcgagcctgtaattcaaccacgacggtcacttttttaccgttatgggcagcatggatcatggaatcaataatgcgggagtcttttgctactcgataaatattaattttgatggagagtacactcgggtcgaaagatgcctgacgtaataattccaatacgtgttcaaaggtgtgatagggataatagagcagcacatcttgttcacgaatcgcatcaaaaccattgcggaaattatcaaaccaagtgtgtcgtaatcttggcaaaggtttattgagtaggtttctcttcccctcattggggaatttaatgaaatctttaaaattgtgatagcgtccgccagcaatcaccgagtcattgtttgacaagccaagtttgctacgcagtaattctaccatttcatctggcatttctcgttgataaacgaatcttacgggttccgctgtcagccgctgtttcagcgtggatgacatgagttcgagcaagcttgattccatctctgttgctaaatcatattcagaatcacgggtcattttcattgaataggcgttcagtgaatcataatcgaaaaagcctttgaaaatttcatcaagacaataacgcataatattgtctagcaggatcattgacttgcggcggtgtggcatttcgggcggcaagttaacaaaacgtggcaccttatctgacggaatttctaatagtgcatattgaatattctggctgtggacaatttcaactgccagataagtgtagtcatcttttagaaattcaaccaggttggtttctggattgatcagaattggtgtaatgtgtggccgcagatgttgacgaaaatattggcgtaaccagatttgttgattgggtgaaatttgtcgttcattgatgagaaaaatttgattgcgagcaatttctaataacagttcattatagagcacatcaaattcttgatcggttttagccactttagcttgaatttttttcaatacatttcgggcgctggtggctgatcctcgttcttcattaattaatattcgtcgttttacatcagcaaaacggactttgtaaaattcatccagattattggagtaaataccaaggaaccgcatccgttctattagtggattgctcttatccgccgcttcttgaagcacacgttcgttgaatgataaccaactaagttctttatcggtatagagcctgtcttgggacattgttactccaggtgttgaggtaaaagtattgaaactttgaatacgacggggcgtcgtttatcgctatcttctcgtcagtagttgctgactcattttttcatcttccttggaggcaaaatattgatgttggaaaacgcacatgcgaatggcggtgcggtaactgccattaataaagaattcgtctattaattcgccctcagtatagaaacctagcttattatagatgtgaatggccttgacattctctttatcaacaatcaggtagagtttatacagattaagtacggaaaatgcatattccattgccagttttgccgctttggttgcatggccttggccctgataggtgggatcgataataatctgaaattctgaccggcgatggatatagtcgatttcgactaattcaaccaaacccactttggcgtcagaactggcgataataaaccggcgctcgctttggtcgtgaatatgtttgtcatagagatcgcacagttcaacgaaagcttcataaggttcttcgaaccagtaacgcatgacgctagcattgttatctaattgatggacaaaagggagatcttcccgctcaagggggacgtaacctaacaggtgaggtatgagaaccaccagacatttgacacctcagtgtttttaataaaaaaggaacataattaatcatagttcgcagtgccgggtatgttaccacagcactgtaattagccgttaatatacccattagggtataaatagattattctgcggcatagccttctggagggaggatctttccatccagatacgctttgccattaaccatacttaggcgcccttcgataaaccagttgataactaatggatagatgttgtgttcctgagtctgaacccgtttgacaacctcattctcctgatccccggcaaaaataggaactttagcttgtaagattaccgggccgccatccaactcttctgttacaaaatggacggaagtgccgtgttctgtatctccatttgttattgctttgcggtgagtatgcagaccaggatatttgggtaacagagaaggatgaatgtttaacaggcggccaagataatgttgcacaaaatctggcgtcagaatacgcatataacccgcgaggaccagcaaatctggttgatactgatcaatcgtgtgttttagcgcttcatcataagtctgacgatctgcatagtttttcgggctaataacatgggtgggaatatccgcctgtttagcgcgtaacagaccgtaagcatttgctgtattactcaataccgcgcaaacctgcccattgattctgttctgctggcaggcatcaatcaccgcttggagattgctgccgctgccagagatgagtacaacgatatttttcattgaatgacaacctgttgttcaccctctttcagtgtcgcgatagtgccgatttgccaggctttctcaccggcagcagtgagtaattcaatcgcctgttcaacggctgttggtggtaaggcaatcaccattccaacaccacagttgaatgtacggtacatttcatgacggctgacattgcctgtctgttgcagccagttaaatatggccggccattgccaactggattcgttaatctgtgcttgggtattttcaggcaggacacgcggaatattttcccagaaaccgccaccggttagatgagcaatagcgtgaatatcaacctgttcaatcaaggataaaagggatttcacataaatttttgtcggggcgagtaggtgatctgccaatgatttactttcaagctcggttgcttctggatcggtgttgctgacggccagaattttgcgtatcagagaatagccgtttgagtgagggccactggcggcgagggcaatcaaggcatcacccgcctgaactttactgccatcaatgatttctgatttttcaaccacgccaacgcagaaaccggcaacatcataatcttcaccgtggtacattcccggcatttctgcggtttcgccaccaaccagagcacagccggataattgacagccttctgcgataccgctgataacgctggcagccgtatcaacatccagtttcccggttgcatagtaatcaaggaaaaacaggggttccgcaccttgaacaaccaggtcattgacgcacattgcaactaagtcaatgccgatagtgtcatggcgtttgagatccattgccagacgcaacttggtgccgacaccatcagtaccagaaaccagaattggctcgcggtatttttgtggtaatgcacataaagcgccaaacccacctaaaccgcccattacttctgggcgacgggtctgttttacaacacctttaatacggttgactaaggcattaccggcgtcgatatcgacaccggcatctttataactgagagaggttttgttggtcactcgaagcccccaaggcggttgcgtttgataaattaagacagaatagtagcaattctaacagtctaagcaaacgtttgcgagactcttgtttaggatctcggttctcggcaattagggctatgtttgatgaaaatcaacggattggtagtggtgttatgggtaaaagacggtataatctcgccgtttttttgtctgctggcgacatgacatacagtaggagaggtccatgaagatcgttgaggtgaatcacccacttgttaaacataaactcggtctgatgcgagcgcatgatatcagcaccaaacgctttcgtgaactggccgcagaaattggaagccttttgacttatgaagcaactgctgatttagaaacagaaaaagtcactattgatggctggtgtggtccggtggtagttgagcagattaaaggtaaaaaaataactgtcgtacctattttgcgtgcgggattggggatgatggatggcgtattagagaatgttcccagtgcccggattagcgtcgtaggggtttatcgtaatgaagaaaccttagaacctgtcccttattttcagaagttggcttccaatattgatgaacgtatggcgctgttggttgacccgatgttggcaaccggtggttccatgattgcaactatcgatttattgaaaaaagcaggctgtcagtcgattaaagtgctagttttggtggctgctcctgaaggtattgccgcgttggaaaaagcccatcctgatgtggaactgtatacagcttctattgatgagagactcaatgaacagggatacattgtgcccggcctgggggatgcaggcgataagatatttggtacgaaataataagttagccgactgttgagtcggcttcagattattgacaaagtgctggttttttatccgacactttgttcagattgctgacgaaccccattcaaaaagtggggttctgttgatgtcaatcatattgttgtagtgtggggtcttttagtatatcaaggtacccattttccagtgtctttattagatcaaagacttggccccgatagctagacttttgtcattaatccgatggggctattaaggccctacataatgtttactgacttcattttctagcgcttgattcacgaaagcgttaatcgtcacatcttcttcaagtgctagttctgcaatttttctatgcaattctggattaactctaacattaaaaatccctttatatggtatatcaggattcttatttaattccttgcagtcttgcaaatacaaatcaaccgagattttaaattcattttccaattctgcaattgtttttgcttcataagtcactaaatcgcggatatattccaatttaccaaaaagagtattgttttccaagtcaaattcaattgtacctaaataacctttatattttaaatatttcatatcaaccccacttcttttaaagtctgtttcacggcttttagtgtaccacctttaatgtaattttcaggatgagggcggtgcattaaaattgtgtgattcaatgattcattgaagaatcgtaccctcgaaccttgcttttcttatttctcatagtttaataggcttaataacacaacaagttcagaccattcaaaagttttttggctattaagaaacttttctatcagtttctccgctttgctcatgtactcttcctttccctcaataatgtaactaacagtagttacaaatatcaaataagtcaagtttcttgtgcattaatgtgaaagataaatgcgtacggtgccgcaaaaaaaaagaggttacaaagtcagttagcgatatctattagtcagaagtaacagatatcgctttaattttatgtttgttctgatttcaaattaactgatcaggtaccgcttattcattgaaattgtggcagataatcacggtttatcgttaatacgtcatccaatagtggtgaagcaatgtctatatcggcaaccagcgggttggtgatcagtgccaacagtgcagcattgcgatcgccatgaatcgctgctttgatcgttaagcgttcataggtttttatctgttgtgtcagagcatacatactgtcaggcaggcggccgaacgtcagcgggtgggcaccttctgcattaataatacaattagtttcaatgacagcatcgtccggtaaacctcgaatagcgccgtggtttgtggtattgaccaccaattgactattgagattgttatggatggcgcaaatcagatccagtgcaacctcagaatagaatgcaccaccgcggaaactgagttgttctggcttgtgatcgagttctggatccgcatacagttcaaatagttcctgttctactttcatgacctgttctgctcgtgtgccttgttcgaacgcagcctcgcgctcctcctgtaacatattgcgggtttggtagaagtagcgatgataagggcaggggatggcacctagtgccttgagtagcggcgggggccagggtgcttcttgaatattattcatggttaagattgcaccattgcatagcatatcaagtacctgttgagttttatcctgacctgaaaccagtacttgatgtacccagaccatatgattcagcccggcaaagtgtaactgcacgtcctgataagggcgttgtagcatattcgctatcatgtgatgcatggtaaccgggacattacataggccgataatttttgctttgctatagcgggaaatcgcttcggtaacgatcccggctggattggtgaagttaataatccatgcgtcgggtgcaagttgctcaactttatgggcaatatctagcaatacggggatggtgcgtaatgctttggcaaagccacctacgccagtagtttcctgaccgatcaagccatattttagccccagacgctcgtccgcaacgcgagctggaagctgaccgacccgtagttgagttaaaataaaactggcaccgcgaatggcgttatctggtgtgaaatggacgctgacaataacgtgttccatgccgtaacgagctaacatacggcgagtaagcgcggcgataatttctactttctgttttccactgtcaatgtcaactagtgccagttcagatagtggaatctcttttttatgttgaataagcccttcgactaattcaggtgtgtagctgctaccgccaccaataatggctattttgatttgtttcatgttttttcctcttgtgatgacattcggcgatagagttcaatcatatcgctggcaagatcttgaataaccattgcgttcattaaatgatcttgcgcatggacggtgatgagattgacaggtaatttaccgcagccttcatctaatccaatgagggtagtctgaatcgtgtgtgcttctttgatcgcctgttgagattcagccatcagtgtttgtgctgtttgaaaatcaccgtttctggcatgttgtaatgccattagtgcatgactgcgtgcgcttccggcataaaccagcagttctacaatagttttttctaaatcaatagttttttctaaatcaatagcttgttctaaatccatgtgtaaatcctccgaaaattagggttgggattgagtttctacacctgtggatgctgtgttttcttgctgtttattttcttcgtcgatcaattgtttttcataaattttgaagaagggataccagataaagagatcgattatcgtgagtatgataactagcactgccgcccgataatcccaagcggcggaaatcattgcgccgatgggtgccggcgtagtccagggcgaaatggcgaccattttatgtaccagatcaagatgcaggacgctgtaggacaatactgcattgaccagtggcacaaccaatagtggaataaataaggtcggattcatcacaatcggtgaaccaaacagcagtggttcgttaatattgaatatggatggaaccacgctcaattttccgatagtacgcaaatgtatagagcggctgcgcagatacagaatcgccagaaccaacgtagaaccagagccgccaatacagatataaaacgcccagtaaggatcggtgagaatttgtgttgcagcagtaccgtgggccattaatgttgcattggtagcaatatttgccataaaaataggggccatcaagccagtgacaatgttggcgccatgaataccggcaaaccacagtaagttagcaatgagtagcgccagtataatggcaggcagagtatcaccgacggaaatgaggggttggaacatctgcattatggctgcgggaataagtagattgaattcactctgtaatagcaagctggcaggataaacggttaacaagatacctatgactggatatagaagttcaaaagaacgggcaatggctggtggcacttgtgttggcattcggatggtgatgttatatttttttagtaaacgtgttagttcaactgaccagatagcgcaaattaatgcggtaaatacacctgcgccaccgaggaaatcgagtgctattttgttttctatttgtggtgctgctgctagcaaaaacgccatgagtgatagtaaagccgaagttaacccgtccagaccgtaggatttagctaaactgtaggcggtaccgaccgaaacaaagacactcattaatcccatcgtcataaagtaaggcattgtgatggtgtcccagtgagttttggcaaaggataaccaagcctggccgaatgaggatgtagtctgtaaatcgaaggggggatttgccacaattaacatcatgctgccgatgatcaaaaatggcatggctgagataaagccgtcacgcattgctgtaatatgccgctggttaccgattcgcccggcaaacgggataatgtggttttctaagacacgcataaaagaggtatagagactcatgagggtactccgcgtgatgatgaaattgtttattccaacaggctcaatgccttatcgagaaccttatcaccacgaagagtgccataatccatcatgtcaataacgtctattggtttaccgagtggtttggcaatagcggaaaaatgggccaattgatatctcacctgtgggccgagtaaaataacgtcagcgtcggctatcaggtgttctaattcaaccgtgggaacagccttgatctcaatgtccaatgcccgttttatcacttctgcctgcatgcgttgtactagcatgctggtggacataccggccgcacaacacaataggatttttttcattgttcagtctccagtttgttatatcgtttcttatgggataagtggttgatgagaactttcactgtttattaagactagcaacttatgttaaatatgttgcgattttgttcgcatattaatcaagaatagtttaaggaatagcgatagagtgtgatcttcgtttgtattgtacagagtgtgaaaattttaggttgtataggatgttgcagcgagatttttcactgatggaataagggtgaatgtttggatacagtaagtattggcaactagtgatgaagcaatgcgaaagttaatctctgaatcagatttcgatatcaaacttaacatgacagagaaaaatgtagaacacacccaagctttcattgaacgcggggtgcaagacttttctctgcctggatttgttacgccatatggttaccgtttgctggcatctgtttctggcaatcaatatagattggtgactgatgcagatatgccggagacggtttacgtggtaaagctcgaattcatggaacatattgttccatcgaagaaaacatgcacacagatactggtgtggcgtacagttcttcctcaacatgacggggcagtgagaggtttgtcacaagagttttttaggtttttccttgaaagatactccatcattgtgtctgacagtgagcaaacgctagatggacgtaggttttgggaacgtatgattgcttgggctatcagtattaatggctatcatgtgtatgtttctgatagcaccaaagaggagcgtccactgagcctgattacctcatgggatgacttctatgtaacctgggctaactattgctggggccatgacaaggattatcactatcatcgcctttttgttatcagtaaagagcgattacattgatctctgctaagaatgaataaaactcactatctgatagctttttcttaaataacataggactgaaaacttaaatttttcatgttgttacatgcagaatattttataggcgtttgcggtctgttctgtgctatgacgagatattatgcgcttctgagcctgaaaaggatttaacttattgaatcctaaaaatagtttttttattatttacctatacagttcatttacaactattttctgtgataaacttgttggcgtttattaccagctctgtttgaggtgcttctgaacacaccatcgcagctttcgttacctttgtatcttcccgatgatgaaacttttgccagtttctttccgggggaaaatgccaccctgttagctgcaatcaaattggccattaatcagccgcatggcagctatatttatttctggtcccgtgatagtgggggccgaagtcatttgttgcatgccgcctgtgctgaattgtccctgaaagatgaagctgtgggttatgttccgctggataaacgtgcctattttatccctgaggtgcttgatggcatggaacacttatcactggtttgtatcgataatattgagagtattgctggtgatgaagagtgggaaatggcgatttttaatctttataatcgcattctggagattggccgcacttgtttgcttattagcggcgatcggccacctcgccagattaatcttaagttacctgatttggcttctcgtctggattgggggcaaatttataaattacaaccgctttccgatgatgagaaattacaagccttgcaattgcgagcgaagttacgcggttttgaattgccggaagatgtagggcgctttttactgaaaagattagacagagaaatgcggaccctgtttatggcattgaatcagttagatcacgcttcgatagttgcccagcgcaagctgacgattccatttgtgaaggatattttgcacctttaaaggtgatggtgatatcacatctatactcgtcatctttcaagttgcctctttgttgactgcattcgctcaccccggtcacatagttatctatgctcccggggattcgctcccttgccgccgcgatccatcttgaaatccattgggtatattcttatcaatcaagaatttcttttactttttccggtgggcgcccaagtctggctttatcaccgcaaaccacgattgggcgctcaatcagtttaggattgacaatcattgctttcagtaaatcatgctgagtgagtttttcatcagccagattcaactctttgtatagatcttctttcgttctcatcaattggcgtgcatcgtgaaaaccaagctgttctagcagaacggataattgctctaccgcgagaggagcctccagatagagaataatctgtggcttaattccccgttcttcaataagtgccaaagtttcacggctttttgagcagcggggattatgataaatcgtcacctgttgcatgagagttccttaacgtttgtattgactgtaacgctgttgtagctggcgtaattgatcgatacgagcatcataacgtgcttgatcgtaactacctaattttacgagtgcactggcactactgaggtatttgatagcattgtcaaactgaccgcgaagtgccatttcttcagcgtgtgctgataattcttcatggcgtttaccttgtttggcggcggcttcggctatcaggtgccaaccgttgggatcatctggattattgaatgtatagcgatgaagtagttttaaagcctgttgatattgttttgcgtgaataagtgcattagcgagattgatttgcaataccaaattgtccttttgtttctgcaaagcgttctgtaaccgggtgatagcctgagcaattcggttctgttcaatgtcgatatcagtcattgtgtcaatgaaccagacattatccggttgttttgctaacagtggttctaaaatagcccgtgcctcagggtattttttatcttgagaaagcaagattgcccggccataagcagcggcaagttgctctttagctgtgcctctacggtagttttctaaaatttgctcaagatagccgcgttgctcggtggtgtacatgcccataacacgaactctggcgaacagaaaatcttgagattgtggaatgttttgggccgggtattgattagcacggttacgtgcatcagcaaggcggctgtcaggtaacgggtgagtgagtaacatttctggtggcttagaactgtaacgggtttgatctaccatgatctgcataaaatctggcataccttgaggatcaaagccagctctacgtaatgtctgcatgccaatacgatcagcttcttgttcattggattgagtaaaactgatcatgccttgttgtataccggcaatagtgccgctgagggctgccatccctgcttgtgggctcgccattagcaaaagaatagaacccaacgtacccgcccaagctagcggtgctgtacgttgctgatcttccatcattcgtgccaggtggcgttgagtaacgtgggaaatttcgtgagccattaccgaggcaagctcgctttcattacgactataacgaaaaagtgcagcatggagtacgacattaccgccaaagaaagcataagcgttgatattcgggttatcaatcagatagaaatggaaaggcgttttaactgagtctgcatgagctactagcctttgtccaagggcattaatgtattgtgtcaataatgggtcataaatcagcggagcgttgttacgtatctggcgaacgtagaaatcgcccattgccagttcctgattgatgctcaggattgaacctgccgtggtaccgatatccggcagtgaatcttcaatagaggcgctgagaacaggggagcttgttagcaataatgtgctgattaatattgctgtcagagattgattagacattattttcatgaaacaaaaatgctctcatttgaccatcgttttagataatgcgtgtatgataaacaagggtaccttaaaattaatcaattagtacaatttttaagaaaaatagaaatatgaatattgctatcaaggagcctggtcaatgctggatatgattatacagtggtatcgccgtcggtttactgatccgcaagttattgcgttatttgtcatcctgttggcagggttttgcattatttatttcttacatggcattttgacacctttgctggtggcgattgttcttgcctatttgttggaatggccaacggctaaacttgaaaaactggggtgttcgcgcacagtggctgtttgtattgtgctgattattttttccagtattagtttgttggtcatcttgattgtggcgccaactgtatggcagcagggaattaatctgttgtcagatatacccaatatgcttaatcggtttaatgaatatgctcagacattaccagcccgttatccggcgttggttgatgctggcattattgatatgatggccgaaaatttgcgcagtaagatttcaattgccggagagtctgtagtgaaattttcggtggcttcgctgattggtctgttaacgctggctatctatctgattcttgtgccactgatggccttcttcttgctaaaagataaaaaccagatgttgcaagcattgcaacgggtcctgccacgtaaccgcattttggccgggcaggtatggcgcgagatgaaccagcaaatcactaactatattcggggtaaagtcaccgagatggtgatcgtcggtatttgtacctacgcggtgtttgcatttcttggattggattattcattgctgctttctgttttggttgggctatcagtgttaattccttatgtgggtgcgttgattgtcacgattcctgttgtactggttgcgctatttcaatggggagtcggaacagatttctggactttgattattgcctatttggttgttcaggggctggatggtaacttgctggtgccgattttattctctgaagccgtaaacttacacccgttggtcatcattctctctgtgattacttttggtggtttgtgggggttttggggcgtattttttgctattccgctggcgacgctgattaaagcggtgatccaagcctggccggaagagatcgttataataggagacgatgaaataaaagagtaaatttatttttaatgatgctggtacccgttattagaggaagcacgggtggtgatatccctcccgtacttgcccctggcatcttgagctgttaaatgagcgtgattaagttttgagtcattttctatttaagggtgcagtttcagataatccaccacgatttggtgatgatcactggtcttaaatttatcaaaaacgtgctcaatattaccgttggtatcaatcaggaaactgatacggtggataccatcgtaggtttttcccataaattgtttcttgccccagacaccaaactgttcagcaacttggtgatcctcgtcggacaataatgtgaagttcagcatttctttctccacaaagcgtgacaatttacttgggctatctgtgctaatgcctagcacttctacacctgaatcctttaatgtatccatttcatcgcgcagaccacaggcctgtacagtacaaccaggagtcattgctttagggtaaaaatagactaaaacacgctggccttcgaaatcagataaattgattgtttctccatcttggtcaggaaggctgaactgaggggccttatcaccggctttcaatgggttcatcccgtattctccgtttaatctttcaactaaagtggttcaagaatactaatactgccttgtgcatttagatctgtacataacttattaaacgcctgcttaataattatgccatcatcctctaataggctgtgggcggtaatttggatttgcaatcgagcagggatattgccttctggtggatgtgtttttgataccagttcagcaatattaaaatcctgtgtagtaaacagattagtaaactgctcaacaataccggatgaatcatcaacatcaaccttaacggaaaccgtagcaggaaatgttgtgtgggtatcgcactttgtgcgtttcatgacgataagaagatcgagctcggcccctttctgtggcagtgaggattcaatcattgtgatagcgttccagctaccggaaagtagcataatgaaggtgaattcctcgccaaacatggctaagcggctgtcttcaatgttacaaccacactcactcacaagacgagtaatggtgttgacgataccagaacggtcagcacctaaagcggttataacgagaaaatgttgttctgattgtggcaaagtcacttttccttctctactgtggtttcgttaaggtaaacataaaaaggctatgctgccaaggtcaattgcatcaaagttgctctatacccgttatccttcaagttgcctctttgttggctgcattcgctcatcccggtcacatcgtttgctatgctcccggggattcactcccttgccgtcgcgatgcatcttgaaatccatagggtatatggtatttccattctctatcattgaatttcaataaattactttggttatcacatctttttaacagaggttatctggtattaacaaaattcattgaaatcctgtgttaaatagtttccttctgaatgactaaaaagtaccatggagctcttgtttgtatagggggttatgtaatgtctagcgggagatttgaatttacaggtagcattgttgcgctggtaacaccaatggatgcgagtggtcaggttgataaggccagtttgaaaaagttaatcgattaccatgttgctagtgggacatcagcgatagtctcggtagggacaaccggagaatctgccacattgagtcatgatgagcacggtgatgttgttttgacaaccatagaattggctgatgggcgtattccggttattgccggaacaggtgcaaatgcgactgctgaggcaatatccctaacgaaacgttttgaaaacagtggcgttgttggttgcctaacggtaacgccttattataataagccgtcgcaggaaggtttatatcagcattttaaaacgattgctgaaaatacggatttaccacaaattttgtataatgtgccttctcgtaccgggtgtgatctgctgccattaactgtagcgcgtttggcgaagattaaaaatattgtcgcaattaaagaagctacagggaacttaaatcgtgttagtcaaatccaagaattggttaatgatgatagtttcatcttattaagtggtgatgatgcaagtgggttggattttattcagctcggtggtaaaggggttatttctgttactgcaaacattgcagcgcctgacgttgctaagttttgtgaattggcattaaacggccagtttgcagaggcgcgtaagttaaataatcgcctgatggatttacaccgtcagctatttgttgaacctaatccgattccagttaaatggggatgtcaaaaattgggtttgattgctgatgacaccgtgcgtctgccgatgacgccattgacggatgcaggaaaagtctcagttgaaaaagccttgaaaatggccggattattgtaaaatttagggaattttaatggcaatattgttgcaaaaatcgaaggtgatgacggttgctggtatgtcacttgtcatgttattggcagcctgttccagcgaccagagctataagcgccaaatcaatgatgatgagacatatcttgaagcacctccccgaaaggcgttgaaagttcctgcgggtatggtattgccattgcagaatggtgaatatgatattccagcaatagcctctcaagggcaggttgggaaagcgcttgatattcgcccgccatctcaggcactagccctattgagtggttcccgtactgaaaacagtgcaaagagcagtaagttgctacttgaaagcactcctgagaatagtcatctgtggtcacagattaacaatgtgctattgaaaaaaggtttccaagttagccaacgtgatgatgctagccagacattgacaactgattggatcgattggctgcgtgcagatgaaaatgttccatatcaggctcgtcatcgtattagtgttgcacgccagagctatcagattgaattatccgttactaatgaagggctgagacaaggtgatcatcagataactgatcctcttgaaatccaacgttataacacactgatgctcaatgaattaattgaaggtgtgaaccagcagcgtgaacgtattagcgatgactctgtagcgcgtaatctaggttcattggatgtacagagtggtggtgatagatctggattacctcagatgattgttcgggcaccctataatattgtttgggatagattaccggcagtactggaaaaagtcggtatgaaagtgggtagccgcagtcgttcaacgggttctattactgtaacttataaaagtctcagttcatctagttggaaatcaatgggtgttaatgaaccatccattagtgaaggtgattacaaattacaggttggtgatttgaataaccggagcagcttacagtttattagtgataaaggtaagccgttgacccaatcacaaaatgatgaattggttgcagcgttgaaggcggctttcagccagaccacaggatcatagatctaggaaagcccctcatattattgacaaagcgctggctgtttagtgagcgctttgattgataaagcgctgttttttaaatcagtgtttgatcgctaaaatctcggataaaaaaacaaactagcgtagtgtgaagaatatcctctccacatcatttcttttcgatatagaaaaaatcggccctttgggcaggattttgtcagcaatctgttttattatttatctttggtatttgtatagtagtaatatcatagtagtaatatctctggagtatataaaatgcaaaaaaaagctgagttgtatcgtggaaaggcaaaaacggtgtacaccacggatgatcctgatttgctagtgctggagttccgtaatgatacatcagcattggatggcgaacgtattgagcagtttgatcgtaaagggatggtgaataataaatttaaccatttcattatgagcaaattggcagaagcagggattccgacgcaaatggaacgactattatcggacactgaggtattagttaaaaagttggatatggtgccggttgaatgtgttgtgcgtaatcgggctgcgggttcattggtcagacgtcttggtattgaggaaggtttggtattgaatccaccgctgttcgatctgtttctgaaaaatgatgctaagcacgatccaatggtgaatgaatcttattgtgaaacttttggttgggttagcaaagaacatttggctgagatgaaagaattgagcctcaaggccaatgaagtattgagcaaattgtttgatgatgcgggtttgattttggttgactttaaactggaatttggtttgttcaaagggcagatagtcctaggggatgaattctctcctgatggtagccgtttgtgggataaagagacattggacaaaatggataaagatcgcttccgccaaagtcttggtggcctgattgaagcgtatgaagaggtagcacgccgtatcggtgttattttggactaattacgcaaacgattacctgggccgaaaggcccttttatttgcacgagctatttgagatgcgttaatattgaataggaattcatttatatagtcgcgatatatttgtgaaaatcattataattcggtggaattattgctattttttactccatttatgattcattgattggaataagttatttattgttcattataccctatggatttcaagatgcatcgcggcggcaagggaacgaatccccgggagcatagacaactatgtgaccggggtgagtgagtgcagccaacaaagaagcaacttgaaagataacgggtatatacccgtaatcattgaagatgcttgattttatccgaaatggagatcattatcctcgctatgaaaatattcattaccgatgaacaaaaagccgaacttgaacatctccatcacacctgccgtgataagagggagtgtgatcgcatcaaagcggtcctgctggcctctgaaggctggagttcagtgatgatcgctcaggccctgcgtcttcatgaaatgaccgttaaccgtcatatcagcgattaccttaatcaaggtaaacttaaatctgataatggggggtctgatagtttgctttctcaagaacaaactgattttttaatcaatcacttatctcaacatcttttccatcacacccatgaaatcgtggcctatgttgctcagctctggaatattacctttagcattcccggcatgaataaatggctacaccgtcagggtttttcttataaaaaaccttgtggcgtccctcataaattcgacgcagaaaaacagcgacaatttattgaatattatgagaatcttaaagtcacagcgaaagacgaacccatcctttttcttgatgctgttcacccgactcaaggcaccaaactcggttatggctggatgcgaaaaggcgagaaaaaaacagtaaaaacaacaggaagccggactcgcctgaatatattgggcgcgctcaacctgaatgccattggtcgtacggtgttccaggaatatcaaaccatcaatgactacaacatttgctgttttttcaatgaaataagaaagtcttatcctgactatcatcaaaaaattcatcttattgtggatggggcgggttacaacaaagctcatcttgttaaggagtgggcttatgttagcaatattgagttacattaccttcctccctatagcccaaatttaaacccaatagagcgattatggaaggtcatgaatgaacaggttcgaaataaccgttattttgcggataaacatgaatttcgagacaacgtcttcaaatttttcaccacaacgctaccggatatagcggactcgctgatgtctagaattaacgaccattttcaggtgctaaaaactgcatcttgaagtttcttgggtatattcatattgagaatgtttttgatgataggttgttaaatgacctaataaagggattgacatggtagaataagctattaattttattttttggctattttcttgtgatagcgtttataaacatttcaatcagatcgtgataaatgcgggtattctgcgataattgcacttcgctaaatgtgaaccagatcttgctgttgtgaacgatcggttattaataactttgatgttggctgcatatactgatgttgcaaataacatttttaatttgaatgaggtgccataacctaaaaatgaaaagcgtcatgtcaaagaatttaactgtatggcggatactgctacagagtgccgtaccatttaaggggacagttgtatgtgcgtttttggccttaaccgttacattatcgtgcgatctaagcggcccttatattatcaggaattatgttgataaggcgacatcaggaacgactgttgatcagcttatcatgttggcaatcatttatgtttttattgcgtcgattggtgttatcggtagtctggtaaccagttacatgagcaccaaggctggttggggtattgctgataccattagatataagctctttcaccatgtgatgacagttttacctgtattggaaatagaacggcgatcacagggagaattgctggaaaatatcgaaggtaatgctgatattataggaaaaacgatttctaaagcaggctttaaggctattgctaatgtagcgctgacattagggacattggtcattatattcagcgtcatgcctcaggcaggtattgccatagcaatcgtcgtcatactcgtggcgtatgtgttgattcaattaaccagactttctgttcgccgctggctaattgcgcgaaatgaaaaagcccgaatctttggttttgtcggtgattcattacatgcaatggatgatttacagccattgtcgcaagcgcattggcctgccattgcatttcgtaaaatgctgtcaatgttgctcaaatttgaacgcagtgcttatattggtggccgggctttttggccaattacccagatcttctttgcactctgtttcggtataggttttggttttgggcttcaattacttggtgagaacagcttaagcatcggcacattaacgatggtttatctttacgttgataaactgcgggagccggtggaggatatgtcatcggaaatagagctaatacagaaattatttgctgctttatcactttcagcaaaaatgttaaatgaaggcaccccagataaatcatcggataatttattgcctgatggtcctctctctatccatttcgataatgttgatttcagttataacggagaagaaactcaggttttgcacggtgttaatttttacgtcgctccggggagtaaaattggcattattggtagaacgggggcggggaaaagtaccattcttaatttgatgtgtggatttgcgcgacccgattcaggaagagtgaccattggcaatgtcgatgtttcaacgattaagccggaagagtttgcgaaaaagattgctgttcttagtcaacggtctcatctgttttccgcaacattgcgggagaatttaacgcttttcagtaatgaaatatctgacgatcaaatttgggaggttcttcaagaattagatgcgcttgaatgggttagagcactgccagatggccttgatacacaggttggtactaatggtctgatgctatcagcaggagaaattcaaatgatagcgggagccagagtgatgttacagcattgctcgttggtgattattgatgagggaacttctcaacttgatccccgaacagaagagagttggctgaaattgcttgaaaagttaagtcacaattgcacggttgtgatggtcgcacatcgccttcacacactttcggtcgttgatgaaattatcattatcgatgatgggcggattcaacagcgaatccctgaaacagaaatcgcaatgttaacgagtaatcatgggctcatggtatgactatatccaatgtatcaactaaagttaaaatgttaccggccttgactgagctgataaaaaagtttgctcctctctatttcattaccatgtttgtgtggacattgatgcatggttttcctctgttgattggttaccaaatcagcaaattactcgatagagcgatgaatgagccaactaaccctgtggtctggtggttgcttgcctctgcgattgccacaatggtcttgcgatcactatttctgttcttggggttaacctttgattttacgttaatcttcaaagtcagcgcttacctgaaagagcgggttttatggggagtaagccactgttcccgcaatcagagacagactttttctcaaggcgatattctgaaccgtattcgtgatgatagtgatgaaattgcggagtttctaagttggacctctgattttatttaccgcgcattacttttaattatcgcattggttgtgcttatcaacactgacataataaccacacttgctcttatgcctatgattgtgggcctttgggttggagcgatacttaaacgcaaggtagggaatttacagaagagtaaacgtcaatcgcaaggggatattgccggcaagattactgacgtcttaacgggtatacgcgacttgcgccttggcaacaaaatggaagggcagattgagcgattatcgcagaaatttgtcagtcgacgggcgattcaagccaaacatcaggtatttactgaccttctttctgggctgttcaaaaatattgtcatacttgggacgtcggctgttttattgatagtgagtaaacggatcgttgatggcagttttactgtagggaatctggcactatttttgacctatatcggttggatcagtgaacagatactcttctttggtcggtcagttgcctattataaaaatgctgatgtgtgttatgggcgaatcagacagtttctggcaaataataaagtagataaaaaagagaccaaagaatatgagccagatgaaattctgcataagttaagtgttaatcatctcgcttactcaaaaactcagcccccagtttcgtttgaggcaacggctaatcaggttattggcattgtcggtgatattggttcgggtaaaaccacttttttgcgttacttgattggtctggaaaaatccagttccggcagtgtactgtggaataaccgagaggttctgggcaatgaaaactggtggcggaatccacgtattggatatgccagacagaaagccggtttttttggtggaactgtaaggcaaaacctcgcgttgggtgataaggatatcgatgatgatgtcatggtacgggcgctggaggcggtaggtttgacgcccggctcatatgaattgccagacgggctcgatactgtcattaattctggctgtgccggtcaattatctggcggtcagcgtcaacgtttggcattggcccggatgttatgccgtcccgctgacgtttatattgttgataactgcgattcatcattagatacggatacggcccgtcgtttatggactgttttacctgagcattggcctggtttgtggattgttgtctcgcataatgccgatcttctcgctaaagcggatcatattgttaccgttcaacagcggagagaattagcataatccattggatatccactcctggctaagtcggtaggagtggatgtcaataatgaaatggtatatattttttccatatctggtgaaaggggattatgagtaagtaaactatttatagtatgaaacttgaatcagatctgcatgattacttcgtggctgctattgcggtgaatatgtgtatatttgcaatagggttgagttggtcgttcactctgttatattgtaaatatgaaaagagaggttgttatggtaaaaatcgctgattatccacaaatgaaaaattatgcttggtatttggctgaggatattgagttaactgatcgtgatgcgcttgcattttacgaacgcaattggaaatatatcgaagaagataagcttggacttcaagagcgtcagctgattgaacgactcatccatgagcaggggaatggttttttgaatgtctaattctcgtcttgaggcagcagaatatcgcccagcctgtgaactgatgtgtgaatatgtccagcgtcataaatatcgtgctttccttcaggaaaaggttgatatcgcacgccaatctgtaaaagagggtaatggtgttgaacatagcgacgtaaaagcgatttttgcggctcgaagagaacagtttaaggctcgtaagtgaacgtaatttggacacctcaggtgccatcgactggtttatgagaactgtctggattttagctttagtgcatacatcacgattgtggccgtaggaagttgagtaattacatgcttattaagaaattaattgccacattggaaggtgaaatacagatattaataaccacattgcttaatgagcaatgggaagccgctagggaattaatgaatgaatcattgcgtatggcggctgatgatttagctttaactgtattggcagacagtttgtgtaactcagatatcgatattatttatcagcagcaaggtgcttgtcatctgcggctaaatactctcaatggaaagttcaatctttatattgggattaaagatcggcaaattaattctctctcgttatctcgatgcccaatacctgatgcgtatgcaaaacagggtatttttatcgaaaaaacgttaaagacgtttggtcttagagatgtcccggatggtttggtctgtttgccatcaccacataatgatgccaaagcacttgtactattgcttgcaggttctggtcctcattcgatggattatgatgttgggcctaattcactgtttcgtatgctggcacatgaattaagtcaatatggaattgcgagtgtacgttttgacaaacgctattaccgtatccggcagagaaatatggaccctgaggttgtcgatctcaatacggaaattgttgacgatgcttgtaatatactgaccggtttaatgggacatattgaatttcacgatgtgccagtatttctggttgggcacagtttcggcggatatgtcagcccattaattgcagagaacttacagcaaaaatcgggtttaaatgttacgggtattgcgatgttggcggcgcctttccgtaatttactccgggtgattttatcccaattacccagtgggaaagagcaagatacgatatctcttgcgagctttttatcagtgccggatagttatctcaaacagattgagaattatcatgcatttgactgcttaaacagcttgcctgccatgccgttattttttgctcagggagatcaggattgccagattttgcataatgttgatttcacgatgtggaaaactgcactgcaaaataataggcaggcagagttcaaactctacactggattgaatcatattttattgcccacaatggggtgcgatggtggagaggattatctgcacccaggtcagatcccggcgcaggtaattgcagatttgactgcatggatcatccaccattcgtcatgaaataggcagcgctattcattttttgcgagcagcttgacccaatcattgattgtcggccagcgggctaaatctgcaaagttaattggataccccacatcatttagccgatcaaccagcatcagcatttttaccgaatcgaaaccgatatcaaaaaggttttcatcctccggtattgtctctgcttctggatgaagcgctttgatttctcgatgtaaaatttcatagataagctgatttttcattgtgcctccaaaaagttttatgaaacaaaacaaactacaattctctgataccttcgattggcgctgatgcagctgcacgatgtgatggatatacaccaaacacgacggtaataaagcaggctgcaagggaagcgagtaaaaaggaatagaaagagaagccaaccgtaatatcaaatagtaataaaattctgaaaccgataaatgaaaataacaatcctaataatgttcccaataatgaaatcaaaaatgcttcggtaagaaactggtaaaaaatgtcggaataactggctcctacggcaagccgtataccaatctctcttctacgttctctaacactaatgagaatggtattcatgacactgacacccgcaacaaagagagtcactgatgatattgataagaggaaaaggttaatttttgattgggtttcatgcaaggttttcaacaattcggtggtattacgtatctcgtaactttgttgatgtttaaaccgtgacaaccgttgttcaatagcgtatttaaccggttcaatatgagaggcatctttggctttcaacaccatgccactaggcggcgtatgaccgaacagccgtaccagatagctgttgcttggcaaaaatgcggcatcatctacccctgcgtccataccttcgcctttctgtgtcaggataccgataacttgcatcgagatgtcgttaatcttgatgctctgcccaaatgcggtttctttttgcggaaaaagtctctcggccagagatgctcccaagacaacgacatttgctagggcagtattgtcttgtggtgtgtaaaaacgtccacgatcaatcaccagattacggataatcgcgatatctgcattggcaccaattaattgaacatcagcagagccttgtggagaaacgattgttcctggcgcagtataaaatagagtgctgtggctaatatggggattacctgaaagtgacgttatatcctcttgtgtcagataatcatgatgggaatcgaaagcgccgttttcttgtcccttatattttactgaaatgatattacttcccattgaggagaccatcttaacaatatgatgcttggtttcttcgccgattgcttgcatgatcacaatcgaagctacgccgatggcaatgcataatagcgtcaggaagactcgtgttttatgggcggcaagagagcgtaccgtcatcttgagattaaataggatgacggttgaataaatattaaattttaaagttattttactcatgctcattgagccaccaaagaaccactgtccagatatagtcggcgtttggcatattcggcaacaacttggtcatgtgttactagaatgatgccgcatccattatgatgtaactcagtaaaaagttgcatgaggttggtcgcattagtggtatctaatgcgccggtaggttcatcggcaataataaactttggattgttgatcaaagcgcgagcgacagcaacgcgctgctgttctcctcctgatagatggcgcgggtatttatctaataaattgtcaagttggagacgatcgattaagtaacggaaatgttctctgtcataatcgaagtttctttttaagtagtacatgggcatcaagatattttcatcaatgcggtagttttccagcaggttataattttgaaagacaaagccaaaatattttcgccgtaaaagcgccaatgagtgaatcttttgctgagttaccgtgagatcattaataagatattctcccgcactggcgatatccaaaagtcctattatattcaataaggtacttttccctgaaccggagcgaccaagaatagcaacataatcattttggtctatggttaagcaaatatctttcaggacaagatgttgtttaccctcattaccataggttttgcagatattatttagcgttatcattttggatcttcccaagattatcttgtttggaaagtacaacgatctgctcgttactctgcaatccgctgacaacgactgaacgccttccattgttatgaccgatcaataattgtcttactacgatgtttccatctttcatctcacgtaaaaaataggtagttagatcatcgttcaaaggttgatgccgtttattattcagtatatcactgggtatagtcactactccggtgctttcgtgggtcacaatagtgacatccgcactcatactgggtttaagcaggaaattatcattagggacatcaaatagcacagtataataaacagcattattaatgagatcgggtttatacataatcttcttaacattaccgtgccatatatgctgatttgtactatagatcttgaaggaagctttttgccccgtcacgatttggttaatatctgcttcggaaacctttgcataaaccgtcatatttttgaggtcggcaatttgcatgagaaccggtgtctgttgattgacatttagtgtttgcccggggtcaacatgaattgcggtcacgacgccagcaataggcgaatagatttggctataactgaggctgacttcttcactgtgcaaaatatgttcattttgcctgatgtctgctttgagactttcaattcttgcctgactttttttgacgccaaaagcagcctcatccagcagttgctggctggttgcggaacgcaggttaagctctctttggcgtttttccgtgatgaccagaagttgataagcgtattgttcttcttgcaacatggctcgcaatttttctagtcgcgctcggcttgcctcaactttagtacgataaaaagtatcatcaatgctagcgaccagcttacctgtttcaacaatatccccgacttcaacatataacttggttaactggcctgaaatttggctaccaacattgacttgactggttggttgtacaataccggcagcattgaccgtagtaataacatcacctaacgttccggtgacgatttgttctgtcatcaccgtagatgtctctttttggctaaagtggttataagccacggcaagaaaagcgatcatgatgatggtgataacaacccatttcttttttttgaccagcacaatcagcatccattttacgatttgttatcgttccgtatcaccaggcatcaagttatgctgagtgcctatgcaatccaataaatcaatcaaaaacagccccatgtcgctgatgatatcttcagagaaaatatcatcatcgtagagccattccagacctattccagttggcaaattgatcagttcgagcgcaatatctcctttaggcttaagccccttgattttttctttggtgcaacgggtttcaccaagatataaaccggtttcaaaccctatttgagaagaaaaataataagtgacttctggcaattgcataccgtgatggtgatgaagatgttgttttaaataggccagtgagatattggaatgagtattcgcgtcggccagaaattcgcggacatatatggataggttaatcagcgaagtttccgcagtaacgtagggcagcagtagtgtggttgcgaagctaccaacactgtcaaacgatatgggaggagctcggttggcacaaggaataccgacgataatctcatctttattgagtaatgaattaatggtcatcagaaatgcgccaatcataatatgttccagagtcaccgcatattttttctgcgtgctggatagttcggccattaattgtggagacaacggcattgaataacgtcggcctcgggccctaagatgagtttccgatgactcattattctgtccgacaaccgaaaggacgttgaataatttttctgtccaaaaatttaatgtttcgtctgacatgcgctgattaatgacattaatgcctgtttccgtcgcagcttcaatcttcggtacattatctgcgtaagcggaagataatttttgcaacacatgagcaatcgacatcccgtcacaaaacgcatgatggaaatttaataaaaggtagtgctcatgttctgctatttttaataacttaaaatataccggtggattatcctgtaacgccatcggcttaaatgccatatcatttaagattttgcggaatgaaatttcaatattaatgccggtagcatgagttaaatcaatatattcgaaaggcaggttctcttcaatagcaggcgagaaggttaaagagagctgcccatctattatggtgactctttggcagagagcagggaaatattgcatgatatacagcaaagcgtaacgtaatttctttaaatcaatctcgccgatcagatgataatatagcgggatattatgagcgccggaacgattagagatagtatcgataatccaataatattggtcgtgttgttctgtcaggcaagaactatttttatcgattaaaaccggtatttgcccttgttgaatgacagattgtaatagataacctaatctaggggtgtgatagaaatcttccaggtgaatagaacaattaaaacgttgctggatcttgtttattaataataatgccttaagcgaagtaccgccggcatcaaagaaattagtctcttcatcaacaatgccgtcgctatcgccaaaaacttcccgccataaagtaaaaaatatttctcgtttttctcctttaatctgcgaaatattatcttctttattcaattctgatattggagcagaattgttggatgatgataattcgacaataaaaggtacctgcaattttggataacatccacgcaagaatgagacgatttcgtgacgtgtaattgagcatgatctatcaggtataaatatattaatatattggtagccagtttcattttcttttatcgctaaatgaatgtcatcaatattaatcgccgccgtaagtaatttttgcatttcatccagatcgacacgtttcccgtcaattttatgttctttatccagacggccaatgaaatttaaattcccttgggcatcataaaatccacggtctccggttaaataatagatttctccatcgttcaactgtaagaacctacgtgaagttgactgattatcgttaatatatccgctacagatagaatcgccacggatgcatatttctccattactgccattaatgatcttattagttccatattcccgaataacgatattggtattggctagcgctttaccaatgatattaccgggttgaaatttatcagctattttgtgactgctagccacaacgcaacattctgttgggccataagagttaatcagagaaataccacatccgactttttccaaccaatgatgaatggctttatccattgccagatcgccaccgataattgtcattctaatcgaaggtgcgagttctttaatggctgcatgtaggaaaaagacaatttgatgccaataattggtaggaaaattaactatagtgaccgattgtgcatggcaaaatgaaaacagtgtctcaagttcaacgatcatattatcgttggcaatggctaatgtggcaccttgataaaaacatccgaacacttcttcaatataagcatcgaaaacgggtgtgctgaaattgagaataacgtcatcttgtttaatatcatactgctctgtcattgcagccaaataggcataaagccccttaaacgttattggtactgctttcggtacacctgtggtgcctgatgtgaaaaagatataggcttcgtcttcttgagtcgccggacgttttatatcatgccccagaaatatctcggaagggcgagtttctatatcttcaataaagagaatatgcgtattattaacaccgtttattttttcatggtaatgacgagcagtgattaataaagaaatattcagactatttaatatgttatttatctcttcttgaccaaatgtcatattgattgggacaaaacataatcccgcagtatggatagataatatagataataaggaatccatccctctgggtaataatacggctacccttcgattttgtagtgggcaggataatagcaattgactgaaagtgaataatttgtggtaaagttcaccgtaattaaggcgatgcacggtgtttatttctgtttgatctccatgaatgactgattttttatccggcgatactgcaacgatttgtgctattcgggcaataatattctctttgataggatgattaataacaatatttttggggttatccaggctagatataatattatccgttggttcaatttctttatatttcacccaatatgcctcaacggtttcattaatattttctgcaatcgtactataaatatgtaaataatcgtcgatcagagtatgggcggcaaaatgactatacaggcggctccccacatccaattcgactaatgctgatatcccatcaggagaaaaccggatgttaataccataattattgaccgcgccagaagtcatacaaccgcgtatagcgcgattatctttcataagatcatgttcaagctcatgcagcaaattaacatagggggcggcaatgaattgatctgcccgattgattgcttcatcattcaaatcatttatatcaatacggctatgcttgctatgcagactaatttgcgactgcattgctacgaggatctgttttatggttgcctgtggggccaaagaaaccatcagaggtaacgtgttcattgccggacgataatagcggtattctcctttatcacgtcggttagagaaaggtaaattgatgatatttgttgatacgcggcctcgtttgctcatttgcagacataaagccaacatcatcattaatttatcattgaaagtaaaactatggttgtttgcggtgagcggccggcttactttaattgcttttgagggaaatagacgtttacgggtataatcctctaatttgggcagttggttgaggtaattattccaatactctttgttgttagcataatgcacgtttgctttatatttaacctcgtcaagataagcctgataggtaaagatcggtgctgatgttgggtggaatgtttgttgttcatagcaagacaaaacatcatgaatcaactgacctatgccccaataatctgtggcaatatggtgagcgatgattccccagaaacagcacccaacatcattaaagtaaagataatgccttatcgtcacacccttttcaggcgctagcggttgagttgttctctttgcaaaatccgcttttgccgctggttctactgctggatctgacagttttattggtataacgtcgaccggcgtagagctcttttcctgaaaaatattgtgttcggcaatacggtaacgtaaggaaaaaccatcattgaattgatgaatggtaataatggcctgcttcaatcttgccagactaatattatcactgaagctgatgaattcaccgacattgaagacagacttatcgtcagcaacagtattagcaatagctaagcggagctgtgtataattcaacggccaatagttgttattatattccattattgtgcggctccacgctatattttatcttgcaactcgccctttattttttcaaaaatagattcatctatgcataatccaatattaccttctgaattaaagcagatcagagggcgtttgcttacacgcagaatgaaatatttattttttcccttgtgatagtatccagacgaataatggataatatgtataccattgcttcggctaaaatcttccaaggaaacgcctgcttcccggcgtaatgaggaaataacccattcgtgtgaatataccccggacttcatcaataattttccttccttggccacggctttatttgataacagttgatagcctacaaataaggcaatgatgataaagagagtcgtcgcaatacttgccgccagcttgttgggattgctgttactgagccagtatggcacaggcagaaaaactaaagcgatcaggacgagcatagcgacattcattaatatgactttgaagtctggatttaatcccacgatattattcatgctgctgccattcctaaagataattcggtaaagagatgaatcacttctttacgttcttcacgtgttgcgggcagattgatataaccacacttttgcgccgcaaacaggcaagcggtgatttcccttctgacagcttctttaaccagtgtatcgaccatttcttggttgttatagagtctggcaagatgaagagaagccgtgccggctgaaaggtcgctatgatcaagtttgggtaaataatttgccatacatacagtcaccgctgtttgtaccgcgaggcttaagtaggctactacgttaactgccgccgccgcattcactgctgcgacaactcgggtgccgacagccacgttgaccgcagcaacgacattggcccctacggcaaggcgagcaatttcaatactggtatcatcttcactgtttaagggttccagaatttctttcagccggagaagaggaggactgtttgtatcttggagctgataggattcgatgttttctttaaaatgtgcgaacaggctggcatcttgattgagatggtgattgattcggcttctcagacttgagcccctttcgtttaaaccataggtttttaggcgggaaaagagcgcttcatagtcgttgatttttaccgcattcattaagtctttatcataagtgatgaataacagtaattcctctgcggaaccggggctaacgatatctttgtctatgccaaattcagctaacactttttccggtgactcccggtattctaatgctaaattgggctgttgttgtagggtttcccagaatcggttataggtgatgatctcttcccaaacttcaaccgggagtttggcgtttgacattgacaaccttagcttattttcttcaacctctcccggagagagtaatgaacgtggcacgccaaacaggcggttgctatcagtgctagcattgacggtgggtatgacactgccaatagctgcaccggcagccacgccaataaatgtacgtcttttcatcattcgttcctttataagttaacggaattctttttttattgagctttatacccgtcatctttcaagttgcttctttgttggctgctctcactcaccccggtcacatcgttatctatgctcccggggattcgttcccttgccgtcgcgatgcatccatagggtatatataagataatatgtaacctttccttattaagcttcttcattactgagataatttcatgaaataattatctaactgatatttcttacctgctatattaattgtaagtgtatattgtgatgaccataacagtatttgggtatatacccgtcatctttcaagttgcttctttgttggctgcactcactcaccccggtcacatagttatctatgctcccggggattcgctctcttgccgccgcgatgcatcttgaaatccattgggtatagaataatttaccctccgttcgattaaaggttagatggtactaactattagctggatggtgacattttgcaataggttagttgattaaatttatattttgagcgtttagactaaatatatttttcgacaaaatatccttatttagagtccgatcacaaaataacaagtaaaaatattcataaagaagaataaaatatttcttttccttgattacctccccatttaataaaaatttgttaaccgaaaaagagttattttggcgatatttgttagtaataacgttaaaatatggattcgattctgttatattttcattcttcaattaagttaacggcatttttttctgctgagtagtagatgagatccagccgttctttagcgttaaatttctttattaccggaataatttctttgtgataattatctaacagattccggcgtgtcctctcgtctttatgcaaatgagcacaggcttggcagggatgaacgattttttccagattaatattgctatcctgcgggcgatatttttttaggatgttgtatggtccctcagttcttaaccagactttcataaagtcttcttcctgacctttaaaaagctgagatacatcgcctccttgtaaacggccaagtttcatttcggggatatgttctaatgtcagcccacagcaagcggaaatttcaccgtgtggtgtcagtacaatattttcaaagacctgatcgcacccttttgccagttgctgatcccggtttggaatatcttttcgttcttcgctggtgtcataaaacggcatccaggtatttcgctgtaaattaatcttgttttgctctttcagtcgcttaataacgggattctgggtgatttgcgttgcaatggcggaatcaaaggtatcctgttctactgtaatcagtgttgtaatattttgttcggccaatgcttctgccgctgtcactacgctatcaaggggaatccattcactgtgatctttccctgtactgatattcatctctgtgatgcccgcatttattaaatcttgagcgattttttgcgccttttctctatttttcccccaataaccgttagtcacgcaacgagttaataagccgtgatctgaggcaaagcgaatggcttcaatcagatctttacctagcaggaaacactccccaccactgaaaacaactaactttagccctggaaaattagcttttgagtgtgcaataaattgtttaatttcatccaggcttaaacgcgcttttaccgaggggttacattcaaaacaacattctttgcaagcagcattgcaagtataggttgtgatcacggtggcggtgtttggatattgttcccaatatccaggagggaagcatggcataatttacccctgttggattaaaggtgatacccgtcatctttcaagttgcctctttgttggctgcactcactcaccccggtcacatagttttctatgctcccggggattcgctcccttgccgtcgcgatgcatcttgaaatccatagggcatatacgttactaactattagcaatatgattttattttgcaatgtattaggtaattaaatttgtattttgagcgtttgctcgaagtatgatttgttacgaaatgaatttatttagaagcagctcacaaaataagagtcgaaatatttctgatgggagataaagtaaatatgtataaacagtaatcgacgattgttcaaggtattgaatattattgtaaggaataaaatcatgtctattgaatttacaccctggccggttgagttagcagagcgttatcgtgaaaagggttattggctgggtaaacccttaactgacatactttataaacaatgtcagcgacaacctgaagcaatagctattatctgtggtaaccgtaaatttagttatcatcaacttgatcaacaatcatctgcattagcctcaaatttaactttagcgggaataaagagaggtgatactgctatcgtacaattgccaaatatagctgaattttatattacattttttgcgctactgaaaatgggggtagtacctattaatgcattgtttagccataataaattagagttacttgcttatgcacaacaaattgatccaagtctgattgtactttcgtcagagcattcacttttacagaataatgatttcctggagcaattaaaaatacattgcccacggttaaggaatatcgtcgttgatggtcgaaaaatacaatataccaatgaattaaaatcgtggttagagtcaacaaatttacctttgaattttgaggcgacacgttcagatgaagtcgctttttttcaactttcaggcgggagtacagggacacctaaattaattccaaggacgcatgacgattactattatagtgtgaggcgcagtgtcgaaatttgtgagttgacacaacagacccgttatctttgtgctttgccggcgcaacataattatcctttgagttctccgggggcgcttggcgtattttatgctggtggttgtcttatattagcaacagatcctgggcctacgacctgctttccacttatacgtgaacataaagtaacaatgacctcattggtgccatcggctgttgcgttatggattcagacgatgaggaaataccaatattcactagaaagtcttcggctattacaagtcggtggagcaaagttaagtgaaagtgtggcgcgagtgataccgaaacttttttcatgtaagttgcaacaggtttttggtatggccgaagggttggtatgttatacccggcttaatgacgatgatgagcgtatatttaccactcagggatgcccaatgagtggagatgatgaggtacgtatcgttgatgataacggcaatatacaagcgccaggttcagcggggatgttaatcattcgtgggccatatacattccggggatattataaaagcccagcgcacaatgcgaaggtattcgacaaagaaggtttttattataccggtgatttagcctatatgacgaaagagggttatatatgtattgtcgggcgtgagaaagatcaaattaatcgcggtggtgaaaaaattgcttcggaagaaattgaatctttgctactcaaacatgaagatgttatccatagcgctttggtttcgatgcctgatcctttgatgggagaaaaaagctgtgcttttattgtggtggctgatccgaatataaacacgttgcaactgcggaaatatttaaggggaatggggattgctgaatataaattgcctgatcgtttcgagattattgatgttatgccggttacacccgtcggaaagattgataaattattattaagaaaactcattcgagacaaattagaaaattaattaatgacatgaaggtattaaaatgaccattccatcattgaaaaattatatgctacctcagccaaaagattttccaggcaataaagcatcttggttattcgaaccccatagggcaattttacttattcatgatatgcaggactatttcttacagtttttcggtgataatagccctctaatcaataaattaattgaaaatatccatttgttgagagtcttttgtaaagaaaaagagatccccattatatatacagcacaacctaaaatgcaaagtgatgaagaacgcgcattacttaatgatatatggggggccggcttgaatagatcaccccatttacaaaatattaaccctgctttggcccctaataacgatgatattgtgatagttaagtggcgttatagtgcatttcaacgctcttcgttagaaaaaaatataaaagacttaggccgggatcaattaattatttgcggggtgtatggacatattggttgtatgattactgcggttgacgcattcatgagagatataaagccttttttagtgggtgatgcgatagcggattttacgctggaagatcacctcatggctttaaaatatgttgctgaaaaatcaggaatggtcatgagtactaaagaaataatttcatcggtaaatttcgataaactgaatttataaaaaatgcataataaatcgctattaaaattaaagaagaaataagatgaaaaataaacaaaatttacaaatggattttagccataaaaccgtctgggtaactggggcggcacgtggtattggtgaacaaattgcccgtgattttaccgcgctgggcgctaacgtaataggtttcgatcgcgtatttgagcaagataatttgccttataaatgtatacaactcgatatcagtgatccagaaaaggtcgaaatgatctgttcccaacaactgtctgtctcagccgagttagatattctggttaatgctgccggtatattacaattgggaaatattgatgagctaaatattagtgactggcatcgttgtattaatgtgaatgcttctggggctttttatctatttcgtagcgtgattccccattttaaacgtcagcgtggtggcactattatcagcgtcagctctaatgcggcacgtgttccacgtatgcaaatggcggcttattgtgcatcaaaatcagcactgacaagtttaacgcattgtgttgggttagaacttgcgccgtttggtgtacgttgtaatgttgtatcgccgggttcgacggatacatttatgcagcgttctatgtggaaaaccgatgatgatgaaaaaaatacgattaacgggtatcctgagcgatataaattaggtattcccctcggtaaaattgcaagtgttaatgaaatttcacataccgtactgttcttgtcttctgatttggcaagccatataacgctacaagatattgtggttgatggtggtgcgacgttagcttgttaattgtttgaattaatacgaaaatacctgtcatttctgtaacgtaaggaaaaattgccctagcctaataggattaataccctatggatttcaagatggatcgcggcggcaagggagcgaatccctgggagcatcgataacgatgtgacctgggtgagcgcgtgcagccaacaaagaagcaacttgaaggataacgggtatataccctatagatttcaagatggatcgcggcggcaagggagtgaatccccgggagcatagcaaactatgtgaccggggtgagcgagtgcagccaacaaagaagcaacttgaaagataacgggtatagggtattgaaatctatgagtcatctcgatcctactttactggtgctgctcgtgttggcagcactgggtatcatcagccacaacatgaccgtcactcttgcaatgctgctgttgttggttatccgcataacgccactgaatcattttttcccgtgggtggaaaaatatgggttgactatcggtgtacttattttgaccgtgggagtcatggcgcctatcgccagtggaaaaattacggtacaagctgtcctcaactcgtttatgaattggaaatcgttgctcgcgatagtaataggtgtattagtgtcatggctgggtagccggggtgtttcactcatgtctaatcagccatcaacagttgctggtttgctggtggggacggtattaggtgttgctttatttaaaggtgttcctgtgggaccgctgattgcggcagggattttgtcattgttgattggtaaatcatagccttatgttgccagaattgagtgtgatacagactgaaatgcagcagcaagggttacgtcgtttgctggtgttgagtggagatgatcattggtgctatttacaggctaatgaattacagcggagatttatcggtgattggttatggatctctcatcgtaaacagcacgctgtgttgccagaaaaggcggtcagtttattaggtcaggaatatctgcacggaatatttgatgctaccgaaggttttaatgcggaagcactggcgatattggcaggtacattgaaagctggaagttggttggtgatgatggttccatcttggtaccaatggcgtgatcaacccgataaggatagcgcgcgttggaacgaacagttagaggcgattccaacaccgcattttgttcagcatattcagcagcaaattgttagcgatccccaagttttactatggcggcaaaatgatcccttatgcatccctgtatttccacaatacagcgcgtggcaactgcctaatggcagcccaacagccagccagcatgccattttggcgcgacttttgcgggcaagtcagggggtatgggttattactgcgccaagagggcgaggtaaatcgacacttgcaggtatgttaatgcagcaatggcaaggaaattgttggttaactgcaccggcgaaggcaacaacagcagtcattaggtgctatgcgggggaaaagggaaaattctgggccgtagataatttgctcaaatattgtagacaaaatagcgtgtcagatattgattggttgcttatcgatgaagccgctgctattccaatgcctcaattatctgaattaatcggctattttccccgcatattgttgaccacaacggtacagggatatgaaggcacagggcgcggatttttacttaaattttgcgttgggcttcctgatcgtcatgtcctgaacctgacagctcctgtgcgttgggcggaaaatgatccgctggaaaattggttggaaagcgctttactgtttgaggatgcaattcctgtcaacaattctgatcaggcgatcagttatcaggtctatcatcagcagcaatggattaaacagcctgaattactgaggcagttttacggcatattaaccagtgctcactacaaaacttcacctttggatttacggcgtttacttgatgctaaaggcatgcaatttgttgcggctcttggaaataatgccttgatgggggctttgtggatggttgaagagggtgggttgacgcttgagttagcccatgaaatatgggcaggcaggcgtcgtccaagaggaaatttggttgttcaatcgttagctgcccatagcggtttaccgcaggcggcggttttgaaatctcaacggatcagcagagttgctgtacaggctaatcatcgcaggcacggtattgctcagggaatgatcgcgtatcaacgggaaagggcagaaaaacagggggtggattttatttctgttagctttggttataccgcggagctctgggcattgtggcagaaatgtggcttccaattagtgcgaatgggaactcatttagaagccagcagtggttgttatacggcaatggctatttttcccctgagtgaacaagggattttgctggggattcaagctcagcaacagcttgcccgtgatgcatattggctggaattgcagattggatttagcttgcctgttgattaccaaactgaccatcatctcaatcaacatgattggcaggaactgtcaggttttgcatttgctcaccgaccattttctgcttcattaccgtccttgcaacggttgttgctgaacagtgatttgccgttgattgcgctgagaaatcatctccagcaggaaatgcgtgttgagcaatgcatcaccgtattgcagttgagtggatataaggcattaatgcgactctggcggcaagaaaccgcacaggcgttatcaagtctggataagaaacttgccaaagattggcaagagtggactacggctttttttgaggccaatcatcttcatcatcccacttgctattaagatcccgatgaggaggcagttccggtttattgtccagaaattttttaacatccagtcggcgtaactctttaatggcattgagaagaacgccaaccaataaaattaaaataatccaccagtaatcagctaaccattgcattaggttgtctcctgcgcaacatggaggtaattttcaaatatatagggtaagttagcagataaccagtcaataccggcgatgtcatgctgctgccatacatccagtaacatttgctgagtcagcaatttttccaattgcttggcgaatggttggtagctgatatgccacggttcatcagcgacactgccacagttaccgacaaaaggacggtaaaaaccgaaatgagccatattctcggtcaaccaatgagttaatggtgcgaaataaccaccattttcatattcccaaggttcgagtaataacatctggttagccggtagcattgttggatcatagacatccagatcggttccccagtgatgacgactaccaccgggcagggcagaccaacgaagaattgccttacagcgttctccttctgataactgggtgatatccattggctggctgttttcatccaacaccgggcgttcaccacggaattttccattccagatagcttgctgacgttgaaaatcacggaacgtgctggccggttgcagattaattccggccttttcagcggcttgctgcatggaaaaaaaagcattggcggcttctggttgtaatcggtgattgccaaagagggcaatcaagtggccagtcgccagaccggttaacatatttgctgtgatcactggattaactgctccataacacgttgataaatccggctaagttgttgcagatcggcggcgctgacggactcattaactttatgaattgttgagttgagtggccccagttcgacaacttgagcgcccatctgagcgataaatcgtccatcggatgtaccaccactggtagataattcaggttgatagccacaatattggtctattgactggatgacggcattgactaactcacctttggctgttaggaaaggctgacctgccagtatccactcaatcgtgtaattgagattgtgatttttgaggatagtttcaacctgttcacggatttggctgtcagtcagttctgtactgaaacggaaattgaattgaacttgcacattcccagggatcacattgtggctgcctgttcccgcgtggatattggcaatttgcatactggtcgccgggaaaaattcgttcccttcatcccaatgtgtattgaccaatgtctgtaaagcaggaaggacacggtggatagggttatcagctaaatgcggataggcaacgtggccttggataccgtgaacagtgagattcgccgtcagggaacctcgacggccatttttcaccatatcgccaagacggtgctggctagaaggttcacctatcaggcaataatccaatcgttcattgcgggacatcaaggcttcaaccactttaacggtgccgtgggtggctttcgcttcctcgtctgaagtaataagaaaggccagacgtccattatggttgggatgggcggcaacgaaacgttcagccgcaacaatcatggcagctaatgatcctttcatatctgccgcaccccgaccatataacatgccattacggatagtgggctcaaatgggggatattcccactgagattcatcgcccgcagggacgacatcagtgtgtccggcaaaggctaacgtcgggcctatgccgcgataggcccaaaaattgtttgtatcgccaaagggcatccgttcaatggtaaagccaattgtttgcaaatgagcgatcataatatcttggcaacctttatcgtccgggctgatagagggttgtctgatgagttgttgtgcaagttcaatgacagggcaagtcatttcagcgtgcctcagcaaaaaattgctgatattcatccactttataacctaataggtaatcaccttttgcagaaattaatagtggacgtttgataatagcgggttgttccaacatcaacgcttttgctgcgtcagcattattaattgttgctcgttgttgatcggtcagtttacgccaagttgtaccacgggtgttaattaatgattcccaacccagtttgtcaataaatgactgcaaaagtgtggcattgagtccatcaacacgataatcatgaaacagataagtaatttcttgttcctccagccaacgacgggctttttttatcgtgtcacaattcttgatcccatagagagtaaaagcgggttgagaagatttatccaatatcatttaacagatccttaaaaaaatttaaatacctaaacataatgctggaaaatgcctgttttatccagatgatatcctgatttttattatcggagataccaaaacaggagactcaattttattggcctgttctcatagggggtatttgcgacataacattgactacataacaacgataagtaagagccgaccctcggtaataagctcaaggagcggctcggaagaaatattaggctactccatttttcctatgttgcaaatacatgatggttgcagccaggcgggaacgtacattcagtttttttaacaagtttctgatgtgtaccttcactgtctcttcagaaataaataggacatcagcaacttccttattggtcatgccactggaaacttcttttaatacatctaactcacgtttggtcaattcagataaaggatcaacatgtttatgacggttagcgagatgttggtatattttttcactaaatacagtttgtccacgagcagcatggcgaatactgcttaataacgagtctaagtcgctatctttaagtaagtagccattagctcctgcgtcaatggctgcgtaaacatcatttcgatcatctgaaacggataataccagtacataggaattgatcccttttctacggatagatttaatcgtgtccacgcctgaaagaccattcatattgagatctatcataatgacatcaggtttcagcttgcatgcaatatttattgcttcttcaccattgtcagcttccgctgtcacggtaagcgcccgatcgagctctacaatctgtttcaagccatggcgaatgagagggtggtcatcaactatcatcactgaatggttatacattttccttctcccttaaataagtaaagccacgaaatgcagactttgaatttgattaaaaggcagtaatgaatgggtctgccctaaattaaattgctatgaaaaaattttatcaaaaccgattgatttacagaattgatagctctgtaagtccagaaagcacatcctgatataaaaatataaatagcgcaaattagtttgataagtaaaaaaagaagatgagtaattttcacaaaaaacacataacttcacttattttaatgatgttaaaaatcaatatgttaagttggttattattagatttgttttcttttataaaatttattttaattgaatttatattgagagtttttccgagttatagttattttggttactataactttaatgatattgtataaaggataatgtttctgtctttattttcctagattaagtgcctatttcaataggcgtaaataggcgtaattgttgcaggtcgttcttataaataaaagtgagcactgcctaggttcgcttttttgttctttatggcaaagagtggtatgagtggagaaattggctagtgctttttatgagcaaaaaagtgctactttattgataagatgcggtcaatgttatgatttgacacacagtacctattatactgctcctgctcttactccagattgtatataaaggatccgacgatggatgaaaaattaaaacagagtgcattggattttcaccagtttccacaaccagggaaaatcacgattactcccactaagcctctgataactcagcgagatttggccttagcttattcaccaggtgttgctgcgccttgcttggaaattgcagaagatccattagcagcttacaaatatactgcgcgtggcaatcttgtggcagtgatatctaatggtagtgcggttttaggattggggaatattggtgcactggcaggtaagcccgtgatggaaggaaaaggtgtcctgtttaaaaagttctcaggtattgatgtatttgatattgaagttgatgagtctgatcctgacaaattgattgatatcattgcggcactggagccgacgtttggggggattaacctcgaagatatcaaagcaccggaatgtttctatattgagaaaaaactgcgggaaaaaatgaacattccggtattccatgatgaccagcatggcacagcgataatttgtaccgctgctgttttgaatggtttgcggattatgaaaaaagagatttcagcggttcgcttagttgtttctggtgccggagctgcctcaattgcctgtatgaacttgctggttgcgcttgggttgcaacgcaagaatattgtggtatgtgactctaaaggggtgatttatcgtggtcgcgataaaaatatggaagaaactaaagcggcctatgcgattgaagacaatggcagccgcacattaggtgatgttatccctggtgccgatattttcctcggatgttccggccctggcgtgttgactcaagacatggtgaaaatgatggctaaagatccactcatcatggcattggcaaaccctgaaccagaaattttgccacccttggcaaaacaagttcgccctgatgcaatcatttgtactggtcgttctgattatccgaatcaggttaataatgtgctctgtttcccgtttattttccgtggtgcgctggatgttggtgcaacaaccattaacgaggagatgaagctcgcctgtgttcatgcgattgcggatttagcgctagcggaacagagtgaagaagtggcttccgcttatgatgatcaggatctgttttttggcccggagtatattattcctaaaccatttgatccgcgcctgattgtgaaaattgccccggcagttgccaaagcagcaatggattccggcgtggcaacccgcccgattaaagactttggcgcatatattgagaagctgaatgagtttgtctataaaacaaacttgtttatgaaacctattttttctcaggctaagaaagcgaaaaagcgtatcgttttggccgaaggggaagaagtacgtgtattgcatgcgactcaggagctgatctctcttgggttggcttacccgattctaattggtcgccctagtgttatcgaaatgcgtatccagaaactgggattgcatattgaagcgggtaaagattttgaagtcgtcaataatgagaatgatccgcgcttcaaaaaatactggcaggaatatcatcacattatgaaacgtcggggtgtttctgctgaacaagctcgccgggcagttatcggtaatcccaccctgattggggcgattatggtactgcgtggtgaggctgatggcctgatttgtggtactgttggcagttacagtgaacattacgatgtcgtgagaaatgtatttggtttccgtgatggggttcatactgctggtgccatgaatgcattgatgttgccaagtggtaatacttttattgcggatacttatgtcaataatgatccaacgcctgaacaattggcagagattacccttatggcttcagagactatccgccgtttcggtattgaaccaaaagttgcgctgctttctcattcaagttttggttccacagattgcctctcagcgcagaagatgcgccagacgctggaattggtgaataaaatgtcaccttcacttgaaattgatggtgaaatgcatggtgatgccgcattggttgaaagtattcgccgtgacatcatgccagatagcccattgaaaggggctgccaatctgttaattatgccgaatatggaatctgcccgtatcagttataacttgctacgtgtcaccagttctgaaggcgttaccgttggcccagttctgatgggggttgccaaaccgatacacattctgacaccaatttcttctgtacgtcgtatcgttaatatggtcgctctggcggcagttgaagcacaaactcatccgctgtaatacccatcgcccctgtttcctgtaggcaggggcggtttgttgtaaacgattcttattatctacatgatgggcaaaacattaataatatggatatggacatgatgaaatttctcacgactgtaaaatcttttctgattatctgtggcttactgatcttatctggatgtgtatctgtacaccaaaaaaccgctctccaggcactttcaccggaactgactcaacaaggggctattatcgatcttaaaaccggtcacgccctgacccctgatgaattgatcaatcggctggcatcacatcaacgggtaattgtgggtgaaaaacatgataatccatatcatcatcagatagagatttggttggttcagcaacttccgcttaaaagagaacagggttcggtcctgctagagatgattaatcctgatcagcagcaaaaagtgaataaggttaagagttggttgcaaactcagcctatcgtacgtgaaagccgcataaaagagcttctggcatggcaagatgggtggcggtgggagttgtatggtggattggtcatggagcttatgcatcaaccttatccgttgctgtctgcaaacttagatcgcagtgaaattaaagcggcttatcgtaaccctccggtcctccaggggaatatttctgttgctgaaaatgtcaaggctcagattaaagaggtgatcaaagatgttcacggtggtgaaataacggagcaacagttatctgccatgacaactattcagcaaatgcgggatcgcagaatggcggaacagttacttaaagcgccggctcctgccacactgattgcgggtggatatcatgcaacaaaagtaataggtgttcctctgcatgttaaagaattatcgccccaagaggactttgttgtgttgatcatggctgagaaaagcaatgtactggatagccaatatgctgattatgtctggtatacacccgtaaaaaaaccatagatattttaaacaaatggtggtcttttctctgtatataagaggtcttggcacagggatgtgctcaagttaacgataaagataaaaataattttcattagcatatgaaattaattatcattactaaatgataattaaaattatgcgctatcatccatgttgacgctgacacactcggcctttcaaacgggtcattttaaaaaagggctcgtttctgctattgctgttcacctcattttggtcggctggattatctcccagccagaagaaattgctgttggtgaattgatgccaccaccggcggtgatgatggagctttcattgttgacagaagcgacacatcaggtacaaaaacaacctattggtcttgaacaacaactttctgttgccagtcgacagcaggaaagtgaggttaatgagattaagacgcctgagcttatgaaagatgaacaggcacagatcttggtacataaacctaaaaaacagaaaaagcaccacgaagagattaaaaaaacacccccggtgaaacgccagcaggtagaagaacaagagagtgaaaaatctcaaagtagcgcggctatggcaagcagtactgccacttctacgaatctgacttcgcgggttgccgctgcttatgacagtgattcaaaggccgttgctgatgcggatgcgttatggcgagcggaagttgtcgggcatttgaaccgctataaacgttatccagaggatgcacagagaagaaaccgcacgggtcgtcctacagtcagattcactattgataaacagggctatgttactaacagtgacttagttcgtcgttctggaacccattctttagaccgggaagcgaagcaaattctggcaagggcgcagccgttgccagttcctcccattgccgttttaaacggtaatgaaattacgatagaaattccgattgattttagtttaactaattaatacttttgaacgacttaaggacagcaaatatgttaaggcagcaagcgtggtttgccctgaaaactaaagggctgttattgatgtttttattaagcggctggttgaatcctgtcgccgcagaggaagaaattatgccaccaaaggcaatgaaacaaccacaccatataactacccacggtgatactcgtatagatgattattactggatgcgggacgataatcgtaaagatcaaaaagtcattgattatctgacagccgaaaataaatataccgagcagatgctaaaacccggtgaacagctacgtgatacgttatacgaagaaatggttggcaggatgaagcaggatgatcaatcggtaccctatacttataatgggtatatatatcggacaacctatgaaacgggcaaagattttccgatttatcagcgtaaaccggttgatggctcatcagattggcagatactggtcgatggtaatgaaagggctaaagggcacgaatattaccaactgagtaattttgccatctctctggataataaacgtatggcgattgctgaagatacgcagggacgccgtaattatcagatctcttttaaagatattgctgataaacagtggaataatgatgtaataaaaaatacttctggcaacatggtttgggctaacgacaacaatacgttgttttatgtgcgcaggcattcacaaacgttactgccatatcaggtatttcgtcaccaatatggtagcaataccagtgaagatcataaaatatatcaggaagaagatgagcgtttttatttaagtatatctaagagcacttcccgcgattatattatgttggcgataaccagtaattcgacttccgaatatttgctgattgatgcgaataaaccacaagctgagcttcaactattctctcctcgtcaggaaggcagagagtattatattgaccatttccgcgatcatttctacatccgttcgaatcatgagaatgaaacttatgggctttatcagacggatgccatcaatataccgtggaaaatagtcattgctccgcggcaagatagtgatcttgaagatttcgatctgtttaatgactggttagtcgtacaggagcgaacaaaaggattaccgacaattcgtcagattaattggcagacacagcaagaaaaacagattaagtttgatgatccaagttatatggcatggattgattacaaccctgaacccaatactgattttgtccgttatggttattcatccatgacgacaccaagctcaacattccaatggaatatgaaaacaggtgagcgggaattacttaagcagcaggaagtaaaaggttttgataaacatcattatgagagccagcgtatttgggtgaaggcccgtgatggtgttgaagttccggtatctctggtatatcgtaaatcactgtttaaaaaaggccataacccaatactgatttatggatatggggcttatggtatcagtatggacccttcatttagctcaccgcgattgagtttattagatcgaggctttgtttacgcattagtacatgtgcgtggtggcggtgaattgggtaagaaatggtatttacaaggtaaagtcgaaaataaggaaaatagttttaatgactttattgatgtgactaaggcactgattgcgcaaaaatatggtgacagcaaacgaatttatgcgatggggggcagcgcgggtggtttgttgatgggcgctgtgattaatcaggcaccggaattatatcgcggtgtggttgctcaggttccatttgttgatgccgtgacaaccatgcttgacccttctattccgctgaccgtaggagaatatgaagagtggggtaatcctgaaaataaagaggattatttccggattaaatcatatagtccgtatgacaatataaaacatcaacgttatccgaacttattggttacgagtggattttatgattcacaagtgcaatattgggaacccactaaatgggtggcaaaattacgggatatgaaggaagataactctattttgttattagaaaccaatatgagtgccgggcatggtggtaaatctggccgatttagtcgattaaaagatactgcactggattacagttttattttgatgctggatgatgctaaaaagtattttccgcaattaaaagataactgaaataaattataaataatataaatttgttatttaaagcactgataataatttatcagtgctaaacatttttattttctaaagacgggtatgtgagcaaatattgatttgtatgcatttgggatgattgaaatgaaaataatgacaaagatagcaggggccggtgtggttttaattgggcttcaagggcttgcttatggtgaggaaaagcaagagagaaaatcagataaggtgatgaaattcggtagccttaaagtttctggttcacaggatgatgcggaagtgagggcaatggaaaggcccggttcatacagttctaaaggagaagatacaaaacttcaatcaacggatagtatattacgcagtatgcctgggacttatacgcaaatagatccggggcagggaacggtgagtgtaaatattcgtggattaagtggatttggtcgagtaaatatgatggttgatggtgttagccaaagtttttatggcacatctccgacgagtcctgctcacgggactacttataaccaattcggtacaatcattgatcctaattttattgtaggagttgatgtcaaccgtggtcaatctgatggctcaagtagtgttaatgcattagtaggtagcgctaattttcgcacaattggtgtagatgatgtgatatttgcagggaattcattgggagtacgcacaaagacagcttatggaaataatggtattggctataatggcatgatagcggttgcgggtaaaacccccgctttcagttctgaaggttcaataggcgctatgttggctgtcagcgggcattcaattgatgcacattataagaatggcgacggagtattaagcgatgagtttgttacagataaatcgtttaagcaaaaacctaattctcaattaatgaaaataaaaattgaacccaatgaatttcatgatatggaactaagtggccgtaactatcataataaatttacccgccgtcatattgatagtcgggatatttatttaaaatacaattacactccatttagtgaatgggttgatataaaattattggtcagtaccagtgagagtcgtcaacgctatgaaggtgattcactttttaaattgctcaatagtaatgcaaaaaataaatcagatgcaatagatatcagtaatattagtcgtttcgactacggtgatacaaattttgagttaacatttggcagtaagttaatggaaaccgaatatagcagaacaacgaatagtgtgtattctggtcgaggtaaagatgaaaaagaaaagcaagaatataacaagaaagacagtgaagtaaaagaaaataatgttttcgcgccaagtggtaaacaagatattgccagtatttatggtggattgaaaataaatcgtggaatttatcaggcagatattacgtttaattatatggattaccgtgtcaaaggctataaaccggcttgtgatctgcgaattccttgttttccccagggagcaaccgaattggatttgaaagaacatgggtttaatccaggtattttactatcagcagaaattattcctgagttccaaccattcgtcagttatgcccgttcaatgagagcacccaatattcaggagactttttatagtaatgaaggtggtgggtccatgaacccatttctgaaaggagaatcatcagacacttatcaaattggctttaacagtttccgcccagatttaattgtaaagggagatactttccgtctgaaagcggcctggtatcatactaaagtaaaaaattatattctcagtgatatctggcttatatgtggcaataggaaaaaatgtaaagccgatagttcgacagattacaatgaagtcgatcctaacatcaaaatgtatatctaccacaatagcttgactccggtaaaaatacacggatatgaaattgctgctgattatgatgcgggtatgttttatagcaaattggcttatagttggcaaaaaacgcgtcaaccaacttcggccgctaccgcgcattttggtgcggagccgttgtcacaactacctgatagctttatgacgttggataccggtgtttgtttatttaatgagaaattccgtgttggtgcgattgttaaatataccggtgattctcataggctggacccagatcaatataattttgatgaagatgggagggttgtgcagcaaaaagaacctaaaatcccaacgatagtcgatctttatagcgattatcagataaatcacaatgtgctgctgaaattctcagtacagaatttggcaaataaaaattattctgaagcacttaatcgtgcaaattcttctccattaatgactgagcaaacttcggctatgcaaactgcccggggccggacttatattgtcggcgcagaaattcgtttctgattatacccgttatctttcaagttgccgtcgcgatgcatcttgaaatccatagggtgtataggaaaaataagtggcaaaggaatgccactatttcagatttgcagatcgttttttccgttcttttttgattttcaacacctcactttcaatccaaccatcttgtaaacgggtattcaagacatcaccaacatctacctgtttggtttgtttcagtaattttccatccgatgtttgactgatgctgtaaccacgggccagtgttgccagagggctaacggcttccatccgtgaacaggaaacggcaaatttttctctggaacggctgatttgccgttcaattgcctgtcttaaccgaaaatcttgttgctgaatttgttgactatagtggtggatttgctggctaggttcagcgtaccagagccgttgttgtaatttttcataagccaggctgttttgctttaagtaccgttgcaagctgtcagtgagtcgctggcgtaaattgaccagtaagttttgctgacgcgctagtcgtagatgaggatgttgttgctgtaaacgatgagataacagactgaaaatatgttgtttctgggcaaagaaataatccattgccatttccaaccgctgttgttgcgactgaatttgacgtaataattcgagctgattacggctaactaactcagcagccgctgatggcgttggggcgcgtaaatctgccacaaaatcagcaatggtgacatctgtttcatgaccgaccgcactgactatcggaatatcactgtgaaaaatggctctggcgacacgttcatcgttgaaactccataagtcttccagcgagccaccaccgcgcccaacaatcaatacatcacactcacgacgctcattagctaattcaatagcccggataatctgtaatggtgcttctgcgccctgaaccgatgttggataaatgatgatgggtaatgatggatcacgacgctttaaaatattcaaaatatcatgcagggctgcgccactggttgaagtaatgacaccaagctgttgagcaggggatggcaggggcttcttgtggctttggtcaaataatccttcggcatcaagtttttgtttcaataattcaaactgttgctgtaacaggccatcaccagcgggttgcatattttcaacaataagctggtaatctcctcttggttcataaagcgtgattatcgcgcgaaccaaaacttgctgaccattttgtggcctgaatgttacccgttgattgctactgcgaaacattgccgcccgcacttgggcacgctcatctttcagcgtgaaataccagtgcccggaggaggggtgagaaaaattggatatctcagcgcttagccaaattctgcccatttccatttcgagtagttgtcgaaccgtctgattaagacgactgacagaaaaaattccagtattaaaaggtagtgacatgtgagaaagatcaaatttcaaaacaataacttaatatgctgatactaacgttcatcataaagtaagcaagaaattttttaataaaatgctggaggcaaccgattacgttctgtataatgccacggcaatattttataccttaaattttcagcagcttggtgagatattgcttatgttacgaattaaaaaagaagctttaacctttgatgatgttctgttagttcctgcccactctactgttttacctaacactgctgacctgtctactcaactgacttcctccatttgtctgaaagttcctatgttatctgccgctatggataccgtcaccgaatccggtttggctatcgcgttggctcaggaaggtggaatgggttttatccataaaaatatgtccattgagcgtcaggcagaagaagttagccgagtcaaaaaacatgagagtggtgttgtgacagatcccgtcacagtggcacctgaaacaacgctgcgtgaagttaaagaattgacagaacgtaatggttttgcgggttatccggttgtcactgaaggaaatgagttggttggtattattactggccgtgatgtacgtttcgttaccgatttggatcagcctgttactgcggtaatgacgcctaaagcgcgtctggtgacagtaaaagaaggtgaagcccgtgaagttgtgttgcagaaaatgcacgaaaaacgtgttgaaaaagcgctggtagttgatgaaaactttcatctgcttggcatgatcacggttaaagattttcagaaagcagaacgtaaaccaaacgcctgtaaggatgcacgtggtcgtttacgtgttggtgccgcggttggtgccggtgctggcaatgaagcgcgtattgatgcattggttgctgctggtattgatgttctgctgattgattcctcgcatggtcattctgaaggggtgttgcaacgtatccgtgaaacccgtgctaagtacccgaatctacaaattattggtggtaacgtggcgactggagaaggcgcaaaagcgctggtagcggctggcgtcaatgcggttaaagtcggtattggtcccggttctatctgtactacccgtattgttactggtgtaggggtaccacaaattaccgctatctctgatgccgttgaagcgctggaaggcaccggcattccagttattgctgatggtggtattcgtttctctggcgatattgccaaagccatcgccgcgggagcgtcgtgtgttatggtgggctctatgttggcagggacagaagaatcaccaggagaaattgagctctaccaaggacgttcatttaaatcttatcgtggtatgggatcattgggggcgatgtccaaaggctcttctgatcgatatttccaaactgataatgccgcagacaaactggtgccggaaggtattgaaggccgtgttgcctataaaggcttgctgaaaaacattgtccatcagcaaatgggaggcttgcgttcctgtatggggctgactggctgtgcaactattgatgagttgagaaccaaagcagaatttgttcgcatcagtaatgccggtattcaggaaagccacgttcacgatgtcactatcatcaaagagtctccaaactaccggttaggtttgtaatccatatttattgtggcccatataagggccacttatctttatttgttacttgtttttttggaattcaccgcacatgacaactaatatccatcagcaccgcattcttatccttgattttggttcgcaatatactcaattgattgctcgccgtatccgtgaaatcggggtttattgtgaactttgggcatgggatgtcactgaagagcaaatccgcgaatttaacccaagcggcattattctttccggtggcccggaaagtaccacagcacaaggaagtccacgtgctcctgaatatgttttcaacgctggcgttccggttctgggggtctgctatggcatgcaaacgatgtcagtacagtttggtggtaaggtagaagattctactgagcgtgaatttgggtatgctcaggttgagattaaagcggaaagtgcattattccgtgggatccaagattcattaaatgagcaaggtaaaccatcattggatgtatggatgagtcacggtgataaagttactgcaattcccgaggactttatcactatcgccagcactgatacctgtccatttgccatcatagcaaatgaagaaaaacgtttttatggcgtgcaattccacccggaagtcactcatacccatcagggacagcgtatattggaacgttttgtactggatgtatgccaatgtgaagcgttgtggacgcctgcttctattatcgaagataccgttgtacgcctgcgtgaacaggttggtgaggatcacgttattttggggctgtccggtggtgttgattcctctgtcactgcattgttactgcatcgtgcaattggtaaccgcctgacctgtgtatttgttgataatggtttactgcgtttgaatgaagccactcaagtgatggaaatgtttgccggcaaatttggactgaatattgttcatgttcccgcagaagatcgcttcctgactgcactggctggcattaatgatccggaagagaagcgtaaaacaattggccgtgtgtttgttgaagtctttgatgaagaggcgagcaaacaggctcaggttaaatggctggcacaaggcactatttacccagatgttatcgaatcagcggcatctgcgaccggcaaagcacacgttatcaaatctcatcataacgtaggtggtttgccggaagagatgaaattgggtctggtggaaccgctgaaagagttgttcaaagatgaagtacgtaaaattggtttggaattgggattgccttatgacatgttgaaccgtcatccattcccaggcccaggtttgggcgttcgtgtactgggtgaagtgaagaaagagtactgcgatctgttacggcaggctgatgctattttcatcgaagagctgcacaaagctgatttgtacaataaagtcagtcaggcgtttaccgtattcttgccagttcgctccgtgggtgtgatgggggatggtcgtaaatatgactgggttgtttcgttgcgagcagtagaaacgattgattttatgaccgcacattgggcgcatttaccatacgatttcctaggccgggtttctaaccggatcatcaatgaagtcaatgggatatcaagagttgtctatgatgtcagcggcaaaccacctgcgactattgagtgggaatgatcccgaatccggcatagactggcactaaagtgttgtggcggctggatcgactcgggcgtagcctcgccgatctgatgcagatcgtggctgaccttgagcagcgcagcgggcagattggttttccatgtgttcgcggcactggccgagttcgagcgcggcttaatccgggagcggacgcaggccgggcctgtggctgcaaaccgaagctggacgaccagcaggtgcgcgagatcaaagccctgttgcgcgatcccgatattcaggtggccgaggtggcccgccgttatggcgtgtcccgaaccacactttacaagcatgtcggcgtcatcacgccgcgccaatgaggatttgggatgacccaacaactagacgccgcaaacagcgtgcgcagcaaggttactcctagagctgttgcagtgcctgtatgtcccgtcacggcagcgactgaggctttggcgacagagggcgggctcgaagcccgaggggccattttcacgcgctttgaggtggtggatttcattctcgacttggttggttacacagaggatcaaccgcttcacgaaaagcggcttttggagccgtcatttggtggtggcgactttctgttgccgatcattgagcggctactgagtgcatggcgggcagcaaggccgagcggttccgcgctcgacgaactaaccgatgcaatccgggcggtggaattgcaccacgagacctttaagagcaccaaagctgccgttgtcacactgctcaggcggcaagggatcgctgcgaatgctgcggtcacgttggctagttactggctgtcgcaaggcgatttcctgctggcaccgctggaggggcaatttgattttgtggttggcaacccaccctatgttcgtcaggagttgattccggcaccgctgcttgcagaatatcgtagtcgttacctgacgatgtatgaccgggcagatatctacattcccttcattgagcggtctctgtcggttttgtcggatggtggcagcctaggcttcatctgcgctgatcgctggatgaaaaaccgctatggcgggccactgcgcagcctcgtagccgagcggttccacctgaaagtctatgtcgacatggtggatacacctgccttccactccgatgtgattgcttacccagcaatcactatcatcagccgtgaagtgccgaggccaacgcgcatcgcttaccgcccggctattgaccctgcgacgctgaccgcattggcaggtttgctcaaagcaccctcgctgccgaaggaagtcggcccggcgcgtgaacttgcccaagtgaccaacggttcggagccgtggttgctggagtcattcgaccagatggcggttattcgccgtctggagggggactttcccctgctggaagaggcagggtgtaaggtcgggatcggtgttgcgactggcgcggacaaagcatttatcggggatttcgacgcgcttaatgttgagccagaccggaaggtgccgctggtaacaaccaaagacatcatgaccggcgaagtggagtggcgcggtctgggtgttatcaacccctttgctgagcagggcggactggtcgatcttgacgagtatccccgtctgcggcgctaccttgaggctcgacgagaggtgatcgctgggcgtcactgtgcgcagaaagctccggccaactggtatcgcacaattgaccgcatcacgccgtcgttggctgcgaggccaaagctcctgattccagatatcaagggacaggcgcatatcgtctatgaaaatggtgaactgtatcctcaccacaacctctactacgtcacgtcagacgactgggatttacgggccttgcaggctgtcctgctatccgcggtcactcgtctgtttgtggcgacctattcaacgaaaatgcggggtggattcctacgcttccaagctcagtacctgcgccgcattcgcattccgcactgggctgaagtgtcagaaccgctgcgccgtgagttagccgaggctgctatcaaacgggacttgcaagcttgcaaccgggctgtgttcaggctctacgacttaagccaagaagaacgatctgccctcgggggaaatggagaataaatggcgctcgatctcgtcgactacgaacagaaagcccgcgaagccgtgaaggcgttttggggcaaccgcgaagcagcaagacaaaaacaaatagagtcgggcaaggccgaccaaggtgaacgtgccggagtcaccgctggcaagaacatggacgggttcttggctttggtgctcgacatcatcaaggccaatgggctagcccatgctgagattcaccagaaccgggcgatgctgaccctgcccggatattttcgtccgactaaactgtgggatcttttggtgctctacaagggacaattaatcgcagccatcgaactgaaaagccaagtaggcccctcgttcggaaacaactttaataatcgaactgaggaagcaatcgggacggctcatgatttatggacagccttccgtgaagaagctttcggcaagcaaccgcgtccatttgtagggtggatgatgatggttgaggatgcgtcggagtctcgtaaatccgtccgcgactcgtcgccacactttcctgtgttcgaggaattcaagggcgcgtcatatctcaagcggtatgacctgctgtgtcagcgactggtgcaggagcagctttacactaccgctgccgtcatcgcggcggagcgcagtgcagtgaataccggcgatttcgcggagctgtcttcaatgaccagcctcaagacgttcgtggcagctttagcaggccacgttgcggcagaagcggcacgattgggctgagataggagcacctatgtccgatcttagcggaagtgaacgtcggaaactggaaaggctgctcggaatgagcggcgggtacgtcctcaatttttccgaccgaaccttcggcgactttttcgtcgaataccgggtggaaattgatgctgaatgctaccgagcgcgcggcacgtcgaaggctaaccgtatgcgcaccttctgggagttggaggcgaactatgtggtgggtcgagttatcggcggtttggtcgactacgccagcgaaaagcagtgctttggtgacagcaacccagtgctgattgacgattgccggaagatcgctcagcggcttctcagtgaccagccggttgctgagctagatgcgctgatagccatcgcggatgaacgagatttcgaggtggtggcggagcacgttcgcgaagctatcgagaaaaatcaacctgagggcgggttagatcggcttcatacgttcgtcaacaagtttatccgtgtaacatgtgcgcctcacggcatcacgatcacccgtggcaaaccgttgcatagcgtctttggcgagtatgtgaaggcgttacgtgatggaggtcatcttgagtcagcgatgaccgagcgtatcttaaagtccagcatctcggtgcttgaagcctttaacgatgtgcggaacaacaagagcttagctcacgacaacccaatcctgaattatgaggaaagcctgttgatcttcaatcacgttgcggcctcggttcggtttatcaagtcgctagaggcgaggataaaagctaaagtgacacaggcgaaacacggtggttgggacgaaagtatccttttctagccgcgatggcatcgcacggaacttggctaccaaaccgtgcactttgaaaggagggtggcaccaaatgaaagatagatcgcatgatgaggtcatggccgagcacttccgcgctgatcgacttatgcagcggagctgcttgccgaagtccgtcgcgacggtgacccggccgaactggccattctgttgcggcagatggcctcggagcaggatgcgaggcaagatgcaaccgatgtagggcgcaaactaaccccctgattagaacgtggtattttcatggtcttgtgagttcctgttattgcaatgtgctgatttatatgtatttttattcgtaatttataagagtggaaagttcccagagtctatagacatcgattgaagcctaaactaaaaacaccaataaaactaaagcgttttttggtgtttttatttatggtatgcactatggatattcactttaggttgctgttaagacttggttttttcagctttattttgtctagaatctgggctggatttaatgacaacaaaccggccatgtgcacaaattccacgacatctagtcttctttcaccattctcaactttggctataaatgattgaggacggccaaatgcttgtgccaatttttcctgtgtaatgcctttttctaggcgtgtttcgcgtaataatcggataacacgctggtattcttctgagtaaattgagctcatccgttttgccttaataaaaaatcctaagatagaatatctctcatttgcaaaaatatccaaaataagaaaaagagaaactttactggctaacttatcagaaaactcaggtttgaagcttttatggcggtaataaaaacataaaataaagacattaaactggttttataattagctcacagttggaaagaacaacatgataaatgaacagtttactcgttgggattcagcagaatacctgaaaaccaaagtagatatggctgcgtatttgaatgcctgtattgaagaagcgggtgatgatcctgcctttattgtgcgtgcgttaggtacaattgcgcgtgcgcatggtatgactcaggtggcaaaagatgccggtctgtctcgtgagagtttatatcgggcgttatctggtgacggagaccctgagtttggcactattctgaaagtcgttaaagcattaggtttgaaactccatgtgacagaggaataatattgatcatagtaatgaataacctgctatttgcccgcttgttgtggaaaggggaaaactaaaaggagtgaactatactggttacagaacaggttcactcactactttagggatgttgcagttaacgctatatgcaaagccacagactcatagagagagggactgttatttgtattagtgtctagcgatactcccacttatatttaagctcaatgaatttgctatcagaacctaagctggcatcagctttttccattttttcaagccatttctcaaaatcataaggccatttctttacatcctcaggtaaagtattggataaaaccgctattgtttctttagggaattttttaactattgcttcgtttttaatataatacatcaaggatgcaccattgttcgtgcatgttaagaaaggcataacaatatctactaactttggaaacatagtttcttgagaaaataaaagacgggaaatattttctgttgtttctggtgattttattgccttttgacgaggccaaacatgggtaaaaaattgaattattaaatctcgccattgtaaaaaaaatttattatcaggttcatcttttgaagaaagcctccatagcaaccataggattttatggcgtaacttctcatcaccataaaaaagagcatctctaaattcagaatcggaaataaattgctttgatttttcatacaatttactagcccaaccaaataataaaaaatttgctactgaatttgtttgatgctcagagtgaaatgacacgctattacgtaaaaagcctagtaaaaatggtttcaaagtatcatacaactgagagcttctggggtaggtttctccccagaaatagccattccagaatgcttccttctcgtctggctcaccatttttgataacatgtaacaaattattattagtccacactggaatatggtgatgtaaccaaattagttgtttgactaaatatactaaagcgtatttcctggaatcacctgataaagtattcaaacgttcaatattagaaagccattgttgagataatttgtcttctaaatggaaattttttagacgagggtctttaaacaatatatgtgcgattgatgacatgggagagttttcagcttctggaatccaatcgcgccgttctcttttaatttcgatggtagtaataggagttggcattatccctatagtgtcaataagatgctttaataatgtgtcatagatgtcaatatctatagaagctaacttttcatttatagacgaaatccaacataaaacaggatcaataattgagactaaatctttgttagaataagacatcatttgtcttgcaataaaataaatgaacttttttttatcattttttcgcgattcagacgacaggaacttttcccatatttctttaggatactcttttttctctttagcccaatgtcttagtgcagaaaaagcccttaatggatattgctttgataatcctttaaaagggtcgttcctctctgaaacgatccgttcaacagaattaaattctaaggcttgcggaataatatcccttataggaatacccaataattcattacagttagattcaatacttatatacccacctttgggttccatagaagtaatggcattatctgctagcccaatttcccattcaggatatatattttgaagttctctaacccgctcttttatatcaatataaaaatgacagcctttattcttaagccagaatattcgatttaggatactatcagcttgccatttatcgcctagattactatctatacatgcaggaatgagcctaccttttaataaacgctcaacaatttcaatgcactcattctctcttaattcatcccatctatctgcaagtgttagcatcaggtctctttgattatgttcattccaaaattcatcatcgcttaatgcattgataagtgggtaaaaatcggaagaggggacgatttcaggcttacatgcaatccatatacgaagttgtgaaaatataggattatttctgggccaactcaagaattcgtttcttgcttcatacaggtctagttgaattaacctttcatacaaatgtacgtatcgcaatacatatccttccagcccgacatctcttatacttaaacctagttctatactgctgtcctctctaattggtgataacaaacgcactgagtgaggtgtccttttctctgattctaacgaataagcgtattcaatatttttcctcagttctggaatcactttaattagtaaagaatttggaatattaattgcatcaaaatggtgtttttctatatatcgtacatctaattccagaaatttacgaagctcagttatcgtattaattggagggagaaggctatttattttgctagatacagctaaatatgggcgcgtcagttttatatattgacggaacgtcacttcattccaaccgtatgttttaatttcgtgtgatagactataccagtggcgttcaaaatcttcatctttatattcatattgccacgactcaattaggtattgccagattttgcgaatttcactatctactttattctctttgagtttctgtaaaatataatgttggatagctggtttaagataattttgtttcgttgcccaccatatggctgtcggctgatgagctacttttgcaagccagacaccaagaaaccattgtctattagataactttgagtttccatattcagatgttgttctgaatgaagcaaaatgtttcttgtttaactctttaatatcatcatgatgtggttgaaacgcatcccatgcctttttagctatttctttatctatatcttcattattcttttgataaatatcaggtgttttatcaaagtctaaaccgtataaagtgaaaggttcaggggaagtgttacatctcaaaggccagtggttattagagtgtgtagcaagtcgtatattacgatcaaaaacacataaccattctgcaggaggtggattatcaataagtgcaaacttcttcataccttttgaagtagatacaatatgagcaacttgtccacgttcgtggggtaagagattggttgggccacgtcgagctatctctatagtttcgctataccattgctctacgttcttcgcttttttcgcccaagcatctaatgtctcccaaagagcagtatgtttatcttcaggactgtaagcaattgcttgaacacctttatgttcccatagttttcttgcttcttctatggttccagattgaaatgcatatacattttttgcttttatcagatttttattaagtccttcgagcaaatattgcattgggggatcatttgcagaatagccaataaatacaactgtatatttagaaaaaatctctcgaataaagttcgttgcccaaccatcagaaagataggctcttccaaactctgaacctgataaaacaaaaccattgccttctgcaccaatgtaatcggaattagatcttccatgaagatataccagtccatcaattaattcatttttggataaatctggtaaatttggaggtagaaaacacggaatctctgtcaaggaacaatcattgaataaacgatcaaagttagttgtaattaattgcactcgaccttcggatgtagtagcaaggtctaacaataatttatgtgcagatgtgtcaactgtgtccgatggtttcagtacttgagctacagttttttcaattaaattcgtttcgaactcttgttctaataagctaaatatccgatctgttgaaataagagttgatgcataagaaggtaatgcaacttcatttccttccttatcttttaatcctttattcaaaaaatcataaagttgacgagcttggctatcattagtcgttccgagtaaatcaataactttttgcgccaattgaaaaaaattaggaagcttagctttggcaagcgatatccctgcgccacaaaagaaaaccacgtgcccttgatcacgggcaagtaataattcatcaggaataagtggtccatcttgaataaaccgcaattttctctccttatattgaaaataatttcattatacttttttatcatttaccttagaataaggcaacttttttctatcccatgtttgtgtttctgatgttgttcataaagcgttaatatttctgaatcaggcaattgataatgtaatggattgataccaccttgattagattgttttgctattttagggtgttttccgatgactattttgctcatatatcgtctctttccctgtagataatatgatttcatcattgaattgttttaataccgtagcaaagtctgcacggactttatccagatcatctgctagagtttcaacgtcacttttctgtgagataagttcacaatagtttgtgttgggcataatatcgaatttcggtgaaattgatcttaatttattaaaatattgtatgaaaatggtcattatattatctgcattattagctgtttctattagttaaatgacttattaacaatgatattttattttgattgaagaatcatacccgataaatatatttatgctatagaaatattgcgggccgtttcaaaaaaaggactgaaaataatggagtataatttcattcaagataatgattagttgtttatatagaattattaattaacatgatttacgacgataagtatcagaatatgctatagtgctggctggttttcgctgatatttttggaatcttatgtcttaccaatgtcccttatgtcatcaatctttattgctcattcgacagcaatggcgctgtgagaataatcatcagtttgattgtgctaaagaagggtatgttaatctgatgcccgttcagcataaaaggtccaaggaaccgggggatagcccggagatgatgcaatcaagaagagtgtttttggattcagggcattatcaaccattacaacgacgggtttcggaattactggaaaagtatctgccagaaaatgcggagagtttgttggatataggatgcggtgaaggttattacactgctgcggttgaagcacagttaagcaagagacgtaattttaaaatctatgggttagatgttgctaagattgcggttcgttatggcgctaagcgctatccggttgttagcttttgtgttgcgtcgagccatcgcttgccatttgccgatcaatcgcttgccggggtgttaagaatttatgcgccttgtaaagcggaagagttggcaagggtagttaagccacagggaattgttttgacagtcactcccggtcctcgccatctttatcagctcaaggagttgatttatcaaaatattcatcttcatccattgaaggcggaactgttggaaggatttgaattgataaccgatgaatcgttatcttatccaatgaaattagatggcctgcaagcgtatcatttattacagatgaccccatttgcctggcaagcaacagaagatgtgaaaaataagttggcagatagagcgctgtttgaatgtgaaactgattttatattgcgggtctatcaacgccttaattgatcaagatttcagcccaaaatatataccctatggctttacaggtgtaaatattttgggctggcggcgttattttgcgtacataaataattctagatgttcaaacaagatattgaagccaattgcaattagaatcagcccaccaataagttcagcgcgtttgcctaaccgtgggccaatataacggccaattaacatacccaatgttgccataatcattgtcatcattccgatagccatcgcagtatgtacgatattgacttcaaggaacgctaacccaataccaattgccattgcatccaggctggtggcaatggctgttgttatcaacacaattgaattatggcggcagggtgactcacactttttttcctgctttgttttgaaactctctgtaatcattctacaacccagaatgaataacagagtgaaagcaacccagtgatcccactctataatatattggctggcataaagccctagagaccagccaatcaatggggtacaggcttctgccaaaccaaatattaaaccggtacggattgcttcacgaaaatgcggtctatgtagtgcggcccctttacaaattgaagcagcaaaggcatccattgaaagtgctaaagctaggatgagggttgcgtacatattcattaatatagcctcggttgggtgtttccatatacatataacccacccccaaccaatgatggtgctatatgcaatggtcttgccaaccgaattaatagctatctcattagactatttcatttgctatttttagcaacaataatgcctgttaagatagcaataaggttacccgcaccacgtttattttgtaacgagcgtgttgatacgggcttttcagaaaaattaactaaatcgtttctctgaaacaggctactccccatgacaatttaaaagatagcacaataattcaaaaagggaaaataatattatttttagggttaaggtatgatattgataataattatcattatctgttttatggggaaaataaaagtcagcgtaaggctgactgtttattgtctatttttttatttattattttttcttatctatctgttttcgatgagaaatttataaattctttctaaatcatcaatttggcttactgatatatataatttcttgttttctaaaccaataaccagaatgccatcttcagataaattcatggtttttatccggctataggaaataaaggtatttgcatagaagaaaccgttatttttaaaaaataatttaggcgaacgtatataggcaatataaatagtcaccaagatagtaaacagcaataaatatgtggttaaacggctaccataaacagtaatattattataaacaacaataagtatcaggataataaagatgagtgcatcaattttatgttttctttttagctttatttgtaagtgagttttcccttttagaaaattcaccacgaattcatcataaacagcaaaagctagcatgagtacgattaaaccagttaatgctatatcattaaggttcattccttatccctatccctgcattgttataaaaaagaaaatatggggaggagtgcctccccgaatgatattgtactaaaagaccattgtactaaaagatcattgtactaaaagatcattgtactagagaccaaggaaaccaaatctggcaccaataatccccagaataaagaagccaataatgatccacagcgcattgactttatgtcgtaataaccacatacaagcaaatgtcagtaaaagtggtaccaagcctggcatcaattgatcgaggatattttgaaccgtggttattgtcttttcacctgtctgttggttaggaatttctgatacaaccagcgggatattgactttcgtccatttattaactaacgcccccataacaaatagaccaaggattgatgctccttcggtcattttttgcaggaagccaccacccatatcctgaacgatattgatccctttcttataaccataagagatacctgaataaagaaccaacaggcgtactaggttgaataagaagaagaataagacaggcccaagccagctaccgctcattgccaagcccgcacccaaagcagcaaatactgggcggactgtcccccagaaaatagggtcaccaacaccggccaatggccccatcagaccgactttgataccgttaatcgcaccatcatcgatcgttgcgccattagcacgctgttcctccattgccagggtgacacccagtacaggtgcgacgacgtaagggtgagtgttaaagaattcaaggtggcgtttgagtgcctgtttacgctcatcggtattttctggatacaaacgacgaagagctggcaccatagagaaacagaaacccaaagcctgcatacgttcaaagttccatgaaccttgaaacacattagaacggagaaatacaccacggatatcactgggtgtcagttttttctggcctgctgtctgagcagtcgtttttgttgtatctaacatgttgctcatccttttaatctaattcgttatcaaggtcgttattggtgtgtccaggggcagccgctacctgagatttgttatatttagggcttagctggatgtacagcacggccataacaataccaataatgcctaatgcaaccaggttaaaatcagtgaatgctgctgtgacgaaaccgagatagaagaagggcattaggtaaccggcacgcatcatgttgataaccatggcgtaacccacaacgacgatcattcccccagcgatattcaagccatcggttaccacttttggaatagaagcaagtaactgctggacttcgttggtgccaaccgatagtgcaacgatcagggcagggatggcgatacgcatagcctggagcagtaatgcggatagatggataaagctaatcgcacgcaggctgccacgttctgccgcgttgtcagcagcatgctgaaaggcgactgtgatggtacgtacaatgatagtcagcacttgccccgctgctgccagtggaatggccaaagcgataccttcaccaatatcacgaccacccgcgatgaccaaaatcgttgagatgattgatgctaaggccgcatccggggcaattgcagcaccgatattcatccagccaagagcgatcatctctagtgtaccgccgataatgataccggttgtcatgtcaccaagaatgatcccgattaaggtacaagccacgagtgggcggtggaattgaaattcatcaagaatggaatccattccggctatacaagctacgatgaatatcaatgcaatttgaacaacggtaatttccattgtttgtctcctgtaaccaaattaaatttggtaagaaatttttgtcgttgagtaatagttaaattgctctgatctgattttcgtttttaaccttctggagtagatccatcatttgtaagcggctgtcactggcaaccttgcgggcttcaagttcaatgcctcgttcatttagttttttgaaggctgcaatatcggtttcatcaacggatattgcgttgttaacttgcgtttttccttgacggaaagccattccaccaatgttgacagaagtgatatcgacaccgtcttcgactaaacgcaaaacatctgttgggtttgtaaacagcaacatgacacgctcattggcatatttcgggttgttataaacgcgaacacattttgcaacatcaacaacgtgagcactgagccccggtggagcaacttgttttagcaaggtggtacggacagtatcagcagcaacttcatcgctgacgacaatgatccgtttgacattggtttcttttgtccaacgagtagcaacctgaccatgaatgaggcggtcgtcaattcgagccagtgcaattttcatatgaccaccggctgatggtgcaaatgaaggtgccgcaacggatgccacgggcttggcgggttcagctatttgaggttcttctgttttcagggcccggatgccttctttcccggtttccagagcaacggaaaccagttctgccagagatgggtcatcatctcgacacataaaggtttcaactaacattggaacgttaactccggtgatgatctcataattctctttatctacggcgatacggctagccgcattgaatggacttcctccccatgtatcgacaagaaacagtacaccttgctctgtattaagcgtttccagtttactgttgtatttttcaaataaggtatcggcattttcaccaggaacgaagtcaatgtaagagacattttcttgctctccaattaacatctctgcggtatgaagcagttgctcagccgcagctccgtgtgtgccaatcataatggctatactcacctgttttcccctctattaacaatatatacccgttatctttcaagttgcctctttgttggctgcactcactcaccccggtcacataattatctatactcccggggattcgctcccttgccgtcgcgatccatcttgaaacccatagggtataaacgcaggattattacacagttactgcaataaatttgatgaatcatccctccaataaaaatcttatttgtacgaataatgaccttttatcaatatgatacctaaatatttgacttgatttagactttatctcttattgactgaaaaaatcggctgttagattaacattagaaataccagaggaaaattgctgtcagtcagaaaaaatgaaatagataaaaatgttaaccacaaaacaatttaataagctaaaaattgcaaaattaatttataattatctgtaatttgcttattgttagatatttattctgccatcggtagcatcttattaatttaaaattgaaaaaatattcatctttttagatcaaaagatgatcattttaagttttggtcaaaaaatatcccaaccatagggttgggatattttcattgcagaagcatttactgattaaaaaacaggttatttatttgattaatcacactgaaccttaattgctaacccaccgcgggatgtttcacgatatttggcgttcatgtctttgcctgtttcgtacatggtttcaataactttatcgagagaaacgcgcggttcgctggtacggcgcaaagccatgcgtgcagcattgattgcttttactgaagcaatggcatttcgttcaatacaaggtacttgtacttggcctgccaccgggtcacaggtaaggccgaggttatgttccataccgatttcagccgcaatacagacctgttcagcgctgccaccgagcagttcagcaaggccggcagcggccattgagcaggcaacacctacttccccttggcaacccacttcagcgccagatatcgatgcattcattttatataggatgccaatagcgccagaagccaggaaatagcggatatagagctctggtgttacaggttcaatacaatggttgtaataagcgagtacggcaggaacaatgccacaagcgccgttggttggtgcggtaacaacacgcccacccgcagcattttcttcattgactgccaaggcaaacatattcaccaaatccacgacattcattggatcattagacaaattgtttgatgaggtcagcatacgatgtaatgccgctgcccggcgtggtacacgcagtgggccaggtaaaatcccttcggtgttcaaaccacgttcaatacaagcctgcatggtatcccagacatcggcaaaataggcattaatttcttctttgctgtggagatccagttcgtttttcatcattaaaccggaaatagataacccggttttattacaattcatcagtaattcttttgctgaattgaatggatatgaaaccggtttggtatcctgagagggtttaccaaagtgctcttcatcaacaataaaaccaccaccaatcgagtagtaggttttgctataaacttttttgtcccccgcgaatgcgtgaatttgcatgccgttttcatgtaatgacagattatcacttcggaaaaccatgccgctatcacgtgggaaatcgacttcatgtaaaccgttggctagtttaatacgctgtgtttgctctacatcacgaataaaaccggggatcgaatcaatatcaacggtggcgggtaaattacctgccagacccatgataatggcgatatccgtatgatgacccttgccggttaatgagagtgagccgtaaacatcgacggctacacgcgtgatagaaggcattaatccctggtttaccagatcgtcgacaaactgtttgccggctttcatcgggccaaccgtatgagagctagatgggccaataccgaccttaaacatgtcgaaaacgctaatcacgctagactccttaaaaaagatagaaatgatatagttatatatattgaggtacgctactttactgtgatttagtagtgttgataagggagtttacaggtttttttgaattatgatagcaacagcgataaagatgggtaaaaaaaatacaaatttgttatccttaaatgatttggatcaaacctgaacttgttgagctaattgatgaattattgtcgctgttaatccccaaatgagatgctgctgataccagtaaaaatagacacgatgctgctgaccacggcgactaacatcaagataatgataactcgaaagtgaaagtgcttcagatagaggaacttcgaatattttggcaacttctgccgggttgctgtggagggataatccggggggcaataatccgacaataggcgttaccagatagccgccgctgctatttaaaggggcgagttgtcccagaacctgaactttctgatgaggtatgttaacttcttcttccgcttcccgtagtgctgtcgcgattattgatttatctttaggatcagcaacgccccctggaaaggcgacttgaccggcatgtgatcgtaaagtggctgagcgtcgggtcaataataacgttggcttcggtttgcagatgattggtaataacaccgcagcatggcggttgttatctgaaagccgtttaggtggtggtggaagttgtaactgaaatctgttaacgaaatcagacagtgatatcatattacttttattttccctagttgcggtaagatacgattcaacttatcaaatgtttcctgatactctttttcagcagtgctgtcggcaacgattccgccaccggcccagcaatatattttttctttctcagttaagagggtacgtatggtgatattgctgtccattgtgccacagaaactaatatagccaattgaaccacaatatccatgtcggcggtgaggttcaagctcttctattatttccattgctctgattttaggcgctccggtaatagaaccaccgggaaagcaggcgcgtaataaatccgtagcatgttgttcatttggcagtgttgcggtgattgtgctaaccagatgatgaacggcagggaattgttcaactaaaaacaattcaggaactttaactgaccccggtgtggctacccggccaatatcattacgcaataaatcgacgatcatcaaattttcagcctggtcttttttcgaggcggccagttttacagcttgcagtacgtccttttctgtatcacttaagcgcggtaatgttcccttaatcgggcgagtttgaatttgtttattctccaggagtaaaaaacgttcaggagagacgctgataacgctgttttccggtaaacgaataaaggcggaaaaaggtgcacggttgttctcattaagttttatgaatgcttgccattcatctccttggtaatcagcgcaaaatcgttgtgccaggttaacttgataacaatcaccacttaacagatagtgatgaatgcagttaattttctcatgatattgtttggcactcatatttgattgccattcactggtcaacgtaaaagccatttttggcgaaacttggtgagaagtaagccagttcaggcgcgtgtcaacatcactgtagctgaataaaatcacctcttttttgtgatgatcaacaatcagcgcccagtcataaataccgattgccatatctggaaatgacaactcatttttggcttgtaatggtaactcttcaaggtaacgcccaagatcatatccccatagacctagcgcaccgccctgaaatggcaaatcaggatcacgctttgctgtaatatttaatttttctagttgtctttttagcaggtaaaagggatcttcctcagtaatatagctatcgccatcttcatttatttcagttgatttattatgactaagcagtgttatccgtggttctgcaaccagaatatcgaaccgattatgaggatggttggcagcaccagaatggagcagcattgcccaagactgatttgaaatcggcgcaaaatagttgatggcagcgtctggttgatagggtaattgccgtttttgtagtgaaatgctcattattgtgttggtttagcagttgtaatgcaaaagtgagtcttgattttaatccttacagattaacatagaaatccattccttacttgagttaaaaatcgctatactcttcggcatagatcactttatagaggttattatcatgttttcagcgatgccagctttatcccatgaggaacagcaacgagcagtagaaaaaattcagcaattgatggttgaaggaatgagcagtggcgaagcgattgcgttggttgcacaagaacttcgtgagcggcatcgaggaaaagagcaggttaatgtggtgtttgatgatgaaaaatgaacataattaaattatttatttaacaataatcacacatttgttttacctgacatgttaggttagctccatatttaatctcttattttgagatattaacgggaggtagtatgaaaacatgtcatatcattaacagagttggcctatcaggtgttgcacttttgctcactgtttcattcacagtatctgctgtgtcggagaacaaacgtgttgataaatttatttcttgtgacaatttaactaaatcgcaaattgccgctcaagtaaagcgtgattttctgcaaaaccgcattaaccattggtcagaagatagaaagcaattgggaacttctaaaccagtggtgtgggtaaaggcggaaaatatcactggcgataaagagatattaaaaattccgctgactgttcgtggttctaagcgtgacaaagattaccgtgttgtcgttgattgtcagcaaaatacgattagctatagtgaattgaaataacattttctgatagttatctctacccgtcatttgacggataccagatttggtgttagccagtaaaggaaatgttatgtcagaattgaaaaaattatatccggcttgtgaagcttatcgttcggggtatttggatacaggcgacggtcatcaaatttattgggaattgtgtggtaatcctgtaggtaagccggctgtatttattcatggtgggccgggcggtggtattgcctcttatcaccgtcggttattcgacccaaagaaatatcatgtcatgttatttgatcagcgtggttgtgggcgttcaaaacctcatgccagcttggaaaataataccacttggcatttagttgaagatattgagcgtttacgtcaattgatgggagtcgaaaaatggctggtatttggtggttcgtggggttcaactttatctttagtttacgcccaaactcatcctcaacacgtttctgaattaattcttcggggaattttcttactgaggccacaagagttgcactggtattatcaggatggtgcttctaatttcttccctgacaagtggcaacgaacggtatctattttatcggaggaagaacgaaaggatgtgatcaaagcgtataataagcggctgactaatcatgatcttcgggtgcaattagaagccgcgcgtctctggagtttgtgggaaggagagacggtaacattgcttccttcaaatagtgtagagtgctttacggaagatgagtttgctttggcatttgctcggattgagaaccactattttatcaatgagggttttatgaatgaggagcagcaactgttgaataatattgacgttatacgggatattccggcagttatcattcatggccggtatgatatggcttgccgggtgcaaaatgcctgggatctggcgcaggcatggccggaagcggaattacatattattgaaggagcagggcattcatttgatgagccgggtattttacatcagcttattagtgcaacagataggtttgccgctcagtaattggatatatacccaatggatttcaagatggattgcgacggcaagggagtgaatccccaggctcatagagaactatgtgactggggtgagcgagtgcagccaacaaagaggcaacttgaaagataacgggtataaccaccggttatccggtggttatacctaattcttactggatgatcagcggcctttgggttcgtagggtaaattggaaagttgtttggataattggcgataatggactaaacgttgttgaaaatattgccgcagatgttcgggttgttcttgttcaactgtatcaggaagtactggcatattgtaacgttccttaaaggctacgccagaagctgccaaatcaacattcactttgtccatattctctgtagaaagttcggccagattgtgtttcatcagtgtctctctcatttacaaagtgataaagctaatccagactggtttttctggcaaggtatgaattgattattttataaagataaataatattcattatcattaaatataaaaattccttgatgaagattattttgtaaatgtaattcattttcatttgaatatattaaatgagattcattttcatttttttattgaaaaatatatttatatttcaatgtgatatctgtttttgatttatttttattatttggttttattattttcatttaattggcataatatagttcaattaataactggagtatctattatgttaaatcaagaagtggttaataaattaaatgagcagatgaatctggagttctattctgcgaatttatatctgcaaatgagtgcatggtgtagtgaacaagggttaccaggtgccgctgcgttttttaaatcgcattctcaggaagagatgcagcatatgcatcgcttgtttgagtatctgagtgatacaggcacaatgccacgtttggggcaaattgatgcaccttcggccgattatgaatctatatctcatgtactcaatagaacttatgatcacgagagatttattactgccgaaattaataaacttgctcatttggcgataaccacgcaggattattctacttttaattttctgcaatggtatgtagcagaacagcatgaagaagagaaattgtttaaatctatccttgataaactggatatggttggtgaggatggtaaagcgcttttcttattagataaggatctgaaaggtctggctgctgcaaatcctgtctaatgaaatggaattaattcaccgcagtagtcgcaataactttaggtatttaaagtcaatactgcggttttcctttatttttgcgcgatagttcacaagacgaaattcttattgtaagttatcgcagataaaataactcttttgatataaaatgatgacaattcatagagattcatttgaaaattaagaggttattgatgaccattagcacaatccgctcttttggccgaaaactatctgctttaattgtcctttttgttgccatatcttgccagcaagctttggcccatgcgcatttaacagaacaaattccggcagaagatactacagtagaaaatacacctcaggtgatcacgctaagcttttcggaaggtattgagctgagttttagtaaagtaaaagtgattggtcctgaaaataaacccattaaaacgggaaagttaaagcttgatccggcaactaatacaaaacttattcttcctatcgaagataaactgacgacagggagatatgatgttaactggagcgtggtctctgttgatgggcataagactaaaggtgtctatagctttacagtgaaataattatgtctctagcggcgctgtatgttctttgtcgcttcacgcatttcgtggcagttatgttagtgtttggctttagcatatttactgccatattggttcctgagcgtttatctgttctgattgatgcgcgccttcgtttaggggtaattatcagtacagttgtgacattagtaacaacaattggatggttggcaattcaatcgggaataatgggtgatggttggcaggatatttgtaatctagaaatctggttggcagtattgggaacaacttttggtaaagtttggcaatggcaaatactggtttcaatagttgctacagggtttttgtttatcagtaaacaaaaagtcagaaatattttgatgttaatcagttctgctgttttactctcctgccatgcctttatcggccattcggtgatgcatgatgggataacaggtgttttttctcagattaatcaggtaattcacttagtgagtgttggatactggtttggtggattatggccgtttttgttatgcttgcaatttttacggatacaaaatgaattggctatagggttggataaacagattatgatctctatgatgcgtttttccacatatggtcacgttgctgtaaccctgattatcattactggcattataagcagcttaattttgctgccgaactggccgaaatatagcggtagtgaatatcaatccatgctatggctgaagatagcattggtggtgggtatggtgatgcttgcattaattaaccgctatatcttggttcctaaactgaagcaacctggccgctatcaattgttgattatcaatagttgggttgaaattattcttggggcattggttctattatgtgttgctgtttttgctacttatcagccgatttgatgttcttaattaagcgcctatctcaatataccctatggatttcaagatccatttcgcttgcttttatacccgtcatctttcaagttgcctctttgttggctgcactcactcaccccggttacatagttatctatgctcccggggatttgctcccttgccgtcgcgatgcagcttgaaatctataaggtatatatctacattggtaactattatgaaacgtttacttttattactttccttattttgtctctcttttcaaaatgttgctgcaccgattgaaacggtgagtaagctacaatttggtgataaatgggcatttacgcgggaagaggtgatgttggattgccgagcaaataaggctctgtttgtgattaatccaagtacgttagtgcaatacccattgaatgatatagccacggatatgatgaaggtagggaaagtgaatgctaagtctttggatattattctattggctgatagcaaaaatccgactcaaaaaatgagcatagagccattccaacaagccgctttagcattgtgcgataagagataatgtcattgagtaagcaatatacccgttatctttcaagttgcctctttgttggctgcgctcgctcaccccggtcacatagtttgctatgctcccggggattcactctcttgccgtcgcgatgcatcttgaaatccgtagggtatagcgtctattttggcttaatggaagatgttgtttttgattatttattatccaaaaagttggtaaaaggcaagtatgtcagctattctttaaattgtaagttgtttttcgtctcaatgacacttttagcgcacggctcttaagagccattttccctaggccgagtagaggagtcaactcggcctttttttatcacaagttttgtggacatcagaccaccctcataacccatgcatgtttttgtctatcataatgctttcggtagagaagaatgtgtttatcgttgagtaaggcgggaatactggtatgttcatcccatccatccaactgcatacaaagttcctggtcggaattacaaggaatactaatggtgatatcgtcttcttgggaaggtgaagagagaatagcatcatcaatttcgtagctggaaattcttaattttgtctggttcattatcgctccttaacttttagataacaggtaagaccagtggggccatcattgagaatagatcaaatagctgagattgccagtaataatattttctgtgttggataatcggtagatgatattgctgttataatgatctgttctaaaacttactcttgtcatattgctttttttatctctgctattctttgaccttttatacattcagtaggaaatatttatttggtgtggtagtaaggactcaaagtgttggtgatggtgtggtaactgcaataattctatggataaattgtttgaatgttttgtttttttactacaccactagtcaactctcaaatgaaagaggctaatgaacgacactactatcagataattgatctttataattgtgtaagaactcaatttgattttattgtatgagggcatagaggcactaacagtgaatcatattcatactggttgtacctctgataatgttttggtgaagtagtgttatctcactagcctttgcaagcacttaataaatataattaaagaatatcttattaaaggcagtaaaaaatttacgtcagtgtgacagactgttaaccttattgttatgggcatttgatgtttttttgatataaaaatagagatgcgttttgtgaatttcatcggataggtcaattatgaataaaaatgagttctatcgggagcttacgggggacctaaaagctctgttgtctggtgagtatgacttaatagcgacgctggctaatgccagtgcattgttgtatgaacgtttgcatgacgttaactgggttggcttttacttgattgatggtaatacgttggtgttaggcccatttcaaggaaaagttgcttgtgtcagaatacctgttggcaagggggtatgcggaacggctgtattggaaaagcgtatccagcgtgttgatgatgttcatgcgttccctggtcatatcgcctgtgatgttgctagtaacgctgaaattgtgttgccgttgatcgtaagcgatagaattatcggtgtattggatattgatagtacggtctttaataggttcgacgagaaagacgaatttggcttacaagctcttattgatgggctttgtgctcatttagaacagtgcgttgtgccgaaatatgttgaattgaatgtaacttaacatatggataacgtggcatttatcagcaacgctattataatgacgccagttcatgcctatgctggttggcaaaaccgttgtaatcaggaaatttcatggaaaatcaacctaagttgaatagtagtaaagagattattgcttttttagctgagcgtttcccgctctgtttcgtagccgaaggtgaagctcgtcccttaaagatcggtatttttcaagatatcgttgaacgtattcaggacgaagagtgtttaagtaaaacacaactgcgctccgccttacgtctgtacacatcaagttggcgttacctgtatggtgtgaaagaaggtgcccagcgtgttgaccttgatggtaattcatgcggtgaattggaagcggaacacattgagcacgctctccagcaactgactgaagccaaagcacgggttcaggcacagcgtgcagagcaaagagctaaaaaacgtgaagctgaaaatgtggctgctggtgaaaaaaatgaacggcccacagccaagaaacccgctcctcgtcgccgtgctaataatactgagggggaaaagcggcagccaccacgcccgcaaaagcgccctcagcaagcacgtaaaccagttgctaaacctgttcaagctaaacctattcaagctgcaccgattcagattgtcgatgtttcatcgctgaaaattggtcaggaaattaaagtaagagtgggtaaaagttcagtggatgcttctgtgcttgaagtcgccaaagatggtgtacgggtacaattgccttccggtttggcaatgattgtacgcgcagaacatttacagttctgatacggaggccgacctgggcatgaacaaattcgtcagactggcttttgtcttaggtgtttcaatttttggtacttgttatgcaaatacaaacagtccagtggctgttcctgttggtattgaacaattacctatattgaagcaagaacctcagcattcaacagttagcgagcgggtaacatcccgcttcactcgttctcattatcgccaatttgatttaaatggtgatttttcggcaaaaatatttgaccgctatctcaatatactggattacagccataacatattattggcgtcagatgttgctcagtatgccgataagaaaaagttgttaggcaaggaattggaaaatgggaatctggaaattccgtatgacttgtttaatttgttacagaaacgtcgctttgagcgttatcagtacgctttatcgcgtcttgaacagccaatgagttttgatggtaacgatacaattgatgttgatcgttccaaagccccttggccacagagtgtggaagagctaaataaactttgggatgctaaagttaaatatgattggctcaacctcaagctcagcggcaaagaggacaataaaatcaaagagatgcttaccaaacgctatcaatccgcgttaaaacgtctgacacaaagccagagtgaagatgttttccaattgattatgacagcgtttgcccgtgaaattgatcctcataccaattatctttcaccacgcaatactgaacagtttaactcagaaatgagtctttccctggaagggattggtgctgttttgcaaatagatgatgactacacggttataaattctttggttgctggtggacctgctgctaaaagcaaagcactaaacgtaggtgataagattatcggcgttgcccagtcaggaaagtctatggtggatattattggctggcgtttggatgatgtggttgcgctgattaaaggacctaaagggagcaaagtacggcttgaggttgtttctgataccaaaggggcaaaaccacgtactgttattttaactcgcgaacagatccgtttggaagatcgggctgtgaagatgtcagttaagacaatcggtcaggaaaaagtgggcgtgcttgatatccccggtttttatgttggtttgactgataatgttaaaactcaattacaaaaactgaccaaacagcatgtcagtgctattgtcattgatttgcgtagcaatggtggtggtgcactgacagaggcggtttctttatcaggcttgtttctgccaagtggcccggttgtccaggttagagataataatgggaaagttcgtcaggattctgatactgatgaagtggtgtactataaaggacctttggttgttctggtggaccattttagtgcttctgcttctgaaatttttgccgcagcaatgcaggattatgggcgagcgttgattgttggtgaaccgacttttggtaaaggtacagttcagcaataccgttctttgagtcgtatttatgatcaaatgatgcgccctgattggccatcactggggtctgtccaatatacgattcagaagttttatcgtgtggatggcggtagtactcagcgtaaaggggtgactcctgatatcgtaatgcctacgggggttgatccggcagaaaccggcgaaagtttcgaagataatgctttgccttgggatagcattcctcctgcccgttatacagggtctaaagttattgctgcattggttcctcagttgaatgttgttcacaatatccgcattacaactgatccagaattcaagtatatcaatgaggatattgctcactataaggcgctgaaagagcataaaaatattgtttctctgaactatgcacaaagagaaaaagaaaataaagaagcggatgctctgaagttgaatcgcataaatgatcgctttaaacgcgaaggtaaaaaaccgttaacttcactggatgatttgcctaaagattatcaggggccagatccctatcttgatgaatcagtgaagattgcacttgatttagcgcaccaacctgctgagaaaatgttggctaaatctaagtaaaataatgggttaaagcttgttaatgattaatgtccaatatcgttcgcttgggatgttttgagtgaacgatattgtgctgtcagtaatatgaacagtctttttcttttcaggaaagatgaattatttcacattttctcagcattaccaggtattagcgtgttttgtttaaccaattggtgttaggctaatgtgggtttttttatgattttgtaaagttgtgttggttttatcgcttaacaggctaaaagccttgaatatagtaagaacagccttatttatagagtagttctgaaagtgcattgatttattaataaaggaagccggtttttatgatgcgaattgttttgttcctcctcactaacctcgctgttatgttggtgttcgggataatactttctttgacaggaattcaggggagtagtgtacaaggtttgatgattatggctggcctgttcggtttcggtggggcgtttgtttctctgctgatgtccaaatggatggccctgcgttctgtgggtggtcaggtcatcgaacagccagcaaacgaagttgaacattggttagttgaaactgttcgcagtcaagcggaacaagtcaatattgccatgccccaggttgcgatttatgccgcgcctgatattaacgcattcgctaccggagcgcgtcgtaatgcttctctggttgctgtcagcagcggtctattggataacatgagtagggcagaagcagaagctgttattgctcatgagattagtcatattgctaatggtgatatggtgacgatgaccttgttgcaagggatagtaaatactttcgttatctttatttcccgtctactggctcaagctgtatcaagtttcctgtctggcaatagtgacgaggaagagagtaactcctctggcaatccgattgtttacatggttgcttcaatggtgttggaaatagtatttggtattctggcgagcattatcacgatgtggttctcgcgttatcgcgaattccatgcagatgcaggttctgctaagttggtcggtcgtgagaaaatgatcgctgctttacagcgtctgaaaaccagttatgaaccgcaggaagaaggcggtatgatggcgttctgtattaatggtaaatcaaagacattcagtgagctgttcatgtctcacccgccattggacaaacgtattgaagcactgcgtagtgggcaatacctgaataaataatattgtgaatcaaataaaagccggggaaatcaaatcccggcttttttacagtttttgaagttttaaattatagctgacttaattcaacatgttcttcctgatcgaagatagttttatcagtttgtcccatcagttggctggtaatagtgccagcagtcattgaaccacttacattcagtgccgtacggcccatatcaatgagaggctcaacagaaatcaataaagcaatcaacgttacaggtaatcccattgcgggtaagacaatcagtgctgcaaacgtagcaccgccacccacaccggcaacgccagcagagctgatagtgacaatgccaacgagtgttgcaatccacatcgggtcgagtgggtttatgcccactgttggcgcaaccattgcggccaacatggcgggataaatcccggcacagccattctgaccgattgttgctccaaaagatgctgaaaagctggcgattgattctggtacgccaatacggagtgtctgggtttcgacattcagtggaatactggcagcactggaacggctgctgaatgcaaaggtcaacactggccaagtttttttgaaaaatctaagtggattgatgccgaagagagaaagtagaaacccatgagcaacaaatactagtgctagtgcaatgtaggatgcgataacaaaggttcccagttttgcaatttcatagatattagagttggcgacaactttggtcatcagggccataacaccatacggtgttaagcgcataaccagacgaaccagtttcattacccatgcctgtatagtgtcaatagcgactaatatgcgttcacccctctcatgatcatctttcaacatttgcagggcagcgatacctaagaaggttgcaaaaataacaatgctgataacagaagttgggttagcgccggttaaatctgcgaacggatttttaggaataaaagataaaatcaattgtggtacagataagtcagagactttgctgacatagttgttttcgatagcagacagacgtgttgtttcttggggaccttgaatcagaccttcagcagtcaggccgaacaggttgataatcatgataccgataagcgctgcaatcattgtcgtgaataacaacgtcccgatagtcagaaagctgatttttcctagagaagatgctttgtgtaatttggcaactgcactcaaaatagaggcaaataccagaggcataatgaccatttgtagaagttgtacgtagccattacctacaatgttgaaccatgatatggattccttcactatggtattatcagaaccataaactagttgcagtgctaagccaaaaataatgccaatggcaaggcccgcaaaaacctttttcgacaggttccattgccgtgaactggcttttgacaatagcaaaagcagtgctacgaagacgagcacattcgaaatgagtggtaaattcatccccaaactccagaattcaatttagttaagttataagttgtatcgaatcgtgtaggtttgcaaacgaacacattacaacaagcagttggggaatatagtatcagcttaaactattctcatttataactataaagaatttaatataacaaatgtgacttttaagatttatttttagtcaattaaagcattagaaatagagatctttgatgcgatttatataaaaaagtatagaagattcaatatcttctggtagaaaaacggcaatgacaattaataaggcagaaataaacctttctgctttcttatttccttgcttgccaagcacaggtagacagaaacgtattttgattggccataataacggcacaccagcaggtgttagcatatctgcaatcagatggctcaaatagccaacaatcatggcatggaaaaaatcagttgggattagccactcttcggggatttttagccaaaataaagtaatccctaatatgagagcaagtaaactgtgagtaaagcctctatgaccacagagtttggcaataggaatggagataaatctgaataatctacccaaggttgaattagggtgatcgatatcgggtaacaaggcagtaagcagtacccctggtagcatatgcagccaatctccattagctatctctggtgttatttctagcttgtgtgccaagataatgctggcaactgaaaataaaagatgcccttctgcggtcataaattcctctgactaataactgtctatccatacagtcggcgaagtatagagggttttatgtgggtaagatagagggtgaaaagcaaaaatatcttatttattaatatatacccgtcatctttcaagttgcctctttgttggctgcactcactcaccccagtcacatagttagctatgctcccggggattcgctcccttgccgtcgcgatgcagcttgaaatccatagggtatatagcgttaattttttgtttgacagaataagacataagcgctacggctgctatgtgaacaataagaagctgccatcggcataagtgatggcagctaaagtgataatcaggtgatgttcatgacagtgagttgttcgagagaatgcagtttaatatctgcgagaacccaacgtggatcatcaaagtgatgagcagatggcacaacgattgaacgcattcttgcagcttttgttgctatcattccattgaatgaatcttccagggccacacaatttatcggagcgacatccaattgttcagcagcgcgtaaataaacttcgggattaggtttactgtgaggtaatttggcagcagaaacgacagtatcaaaatagtgattaagactgaacatttcgagtacttgttccagcatatattgtggagaagctgaggccaggccgattttcagtccttgtttgcggcaaaggtttaaagcatattcaacacctgggagtaagggacggttttcttttaccaaatcgataacatggtcggtaattcgctgttccacgtctgattttgataccccttgccagggagaagcctggtaccaaagttccacaacttgatcaattcgcaacccaagagtatctggtagtttttctgctaaagaaaaatccagacctaattcactaaatacttctttttctccttgggtccaatagggttcagagtcaatcagtaagccgtccatatcgaaaatggccgcttttattggtaaatgaaaagacatttaagtatctctctctggtcagacagttagcgaaagctgattgtaacaatctcagtaggtgaaatcttttcctgatcgggaacatggtaagaaatgcttagttaattaaatataaagttaaatttggtgattgatgggctatgattagccaaaaataaaatctgcttattgttatgaggggtatcgatgacttaccaaaaagccggatacatcgctattattaagcgagttttaggttggatgatttttgttccggcacttttatcgactattgtttctgtgattaaccttgcctggttgcacggtattaaaggtgatggtatcaatgctgttttggatgatttcctgaaaatgatggctgaagtggtgcgttttaataccccatttctggatttcttctggaaaaattcaccaacacctgatcgtctggctggttttaccggatcaacgcttggtttcctgattatctattttcttatttttttcggccttgctatgaatgcgtcaggtcaacggatatacagacaagtgaagtttatacgagaaaacattgaagatcagcttattattgaaaaagctaaaggcaatgatagcctgacaagagaacagattgaattaaaaattaaacttcctcgtcatacattgttcagtcagatttatatcttatatatttcaccggtaattatcggtgcaattttttattttctattgaaaatcttaggctggtagattctccggttggctatagctgcggaataagtattttcgcagcctgattgcccatctattggctattttcagtcaaaatattatcgataatattttgagccgtaataagattatcaccaccaaatagattacaccggttaagcaaataatagagctgatatacaggttgccgttcaataaagttggtagggagtggccatatactctgatagccatcaaaaatttgcattggtaaatcagggtataacggtaacatagcgaaatcacattcacgatccccccaataacaggctgggtcgaaggcaacggcttggtcatccagcgaagcacaattagcaggccagagatcgccatgtaacagagagggttgtggctgatggtgttgaagtttgttacttatagcttgaacgatattgtcaatatcaccaaatatcatgtttttttctgccgcgatttgtaattgccaaccaacccgcttttccgcataaaattgatgccaacgtcgttgccagctattaggttgtggagttgttgccagcatattgtcaaaatcaaagccgaattgaggttgttcactccattgatgaagttttgccagttgttgaccgaagcaataggcactgtgaaggtcaaaagattttaaaggcagaaattcaagcaatagaaagctatggtcacgagtgttgccaataccataaacagttggaacacggatagtttggctgcgtgccaggagttcaagctgttctgattctgctttgaagacagggagcatttcgcgcagatttgatttgacaaaaacttgttgttttccatgtgtgactcgccaagcttggtggatgtctcctccggctaactcagttttatcgtgaatttcagcaacaccgaaatgttcgtttaacaaacgatttactgtctgccacatggttcacctctctatgtcgtcaattactttatgaacaattatagtcagagaaaacatatgatcaggtaaaaaagatgattaacagggttatatctcaaaacagatataaccctttttgttattgattgggctcgttagagatttgtagggctgcttgatacgttttacgtttggattttgctcttacaagttttatctgactgtaagccagtgccagtgtaaagaagatagcctgaacaataacaatgcatggccccgttgcaccatcaatgtggaaactgatcagagtacccaggacactggaactgactgatgcaatgatagcgacaattaacattcggtcaaaactgcggcataacatgaaagcgataatgcctggtgatatcaacattgcgataaccaaaatcattcccacggcttgcagggaagcgacgatggtcatggacagcaggcaaagcaaaccgtaatgcaaaagtttaacaggcaatcctactacgcgtgcttggttcggatcgaagcaataaagcatgaagtctttgcgctttagcagtatcaccgccatagtgatgcaggtaatccataatgtttgatgcaactcatctttagtgatccctagtatatttccgaacagaatatgagtcagatgttggtcggtatctatgcgggcaaaaagaactaaaccaaaggcaaacatgcctgaaaaaacaattcccatgacagtatcttcttttatccggctatgttctttcagatatcctgttgcaacagcacaaaagataccggaaaggaatgcgccaatagccagcggtataccggcagcaaaagccagcacaatacctggtaataccgcgtgagaaatggcgtcccccattaacgaccagcctttaagaaccagataacaagagagtattgcacataccgcgcctgttacaatcgctgcgaatattgcccgttgcataaatggaaacataaacggctcagtgagtaactgtgtcaactcattcataattgtgttgtctcctgagccaaggctgaggattcttttctggcacgtatacgtgaagcgaatagcccatgctttggtgcaaagaagaatgctagtaggaaaataatggtttgcagcgtgacaatgacaccaccagtagcgccgttaaggaagaagcttaggtaagcgccaaatgcactggtcagggaaccaatagtaacggcaatgatcagcaggtgcttaaaacgatctgttaataagtaagctgttgcgcctggagtgacaaccattgcaatcaccagaatagcgccgacagtttgtaaggctgcgacagtacaagcactcaacaaagtaaaaaaaatgattttcatccgcaagggagataagccgatagagcgagcatgcgtttcatcaaaaaatacaattagcaaatctttccagataaacatgagcacgataaatgaaatcgcaataatgatttcaacttggagaacatcttcatccgcgatgccaaggatattgccgaaaataatagtttgtacgttaactgatgtaggattgagggaaacgattaataagccggccgcaaagaaagtggaaaaaatgaacccgattactgcatcttcacgtaaccgagtgatatgacgaactaaagtcatagatagagctgccagcattccggtaaaaaaagcaccacctgcataaggaagacccagcgcataagcaccagcgacgccaggcacaactgagtgagagagcgcgtctcccatcaatgaccagccttttaacatcaggtaggaagaaaggaaggcacagacagcaccgacgatggcactaacccagatggcttttaccatgtaattatagtgaaaaggttgcagcaaaagttctgtcatgattgacgcttctccttatgctgaccctgccttggcggaacatgatgatcacgaccataaaatacggctgcgcgttcatcatcagtaataacagtcaaggagcgtggatcatcatcatcatgtaattccggaccggatagattaatatgacgaagcacgccaccaaaagtcatctctaaatttttttgggtgaacgttgtttctgttgggccacttgctagaaccgttcggttgatgaggataacatgatcgcagaattcaggcacgctaccgaggttatgtgtagaaaccagaactagatggccctcatcacgtaaatcacacaacaggtcgatgatggcattctctgtttttacatcaacaccagtaaaaggttcatctagtaatagaactttaccttcctgagccagagcccttgcaagaaaaacccgttttttctgtccgcctgagagttcgccaatctgtcggttgcgtaaggccgttaagccgacacgttcaagtgctttatcaacagcttggtgatctcttttacttgggattctcaggaatcccattttcccatagcggcccatcataacgacatcagaaaccaatactggaaagttccagtcgacttcttctgtttgagggacatatgcaataatatttttcttcaaagcatttttgactggcatatcactcagcgttacttttccctgagatggacttaccagtcccatgatagtcttaaacaatgtggatttaccactaccgttaatgcccaccaacgcacaaatagttccaccggtgatagaaaaacttgcatcataaatagctgtgtgaccgttgttataagtcacagtggcgtcatcaacgactaaatgaggacgttcgaacagtatattgctattcattgattaaatccttttgcgattgtatctacagttttgttcagtaaatcaatataagttggtactgggccactactgccggagagtgaatctacataaagaacgccaccataacgggcatctgtttctttactgacttgtttagccggtttatctgaaattgtactttcgctaaatacaacggggattttgtttgctcttacagtatcaatgacatgacgaacttgttgtggtgaaccttgttcttccgcattaattggccatagataaacttccttgaattggtaatctttagctaaatagctaaaagccccttcactagtgactagccaacgctgatcctgtggaatacgggaaagacgttctctcagtggagaatccagttgtgcgattttttcagcataggctttggcattcttattataagtttctgtatttttaggatcgtatttcacaaatgcttggcgaatattctcaatatagattaaagcatttgtgggtgacatccaggcgtggggattagggttcccgttgtaaggcccttcacggatagggagtggttcaatgccgtcagtaataacaacggcaggtacatctttaaggttttcaaagaagcgttcaaaccagcgttctagatttagcccattccaaaggatcaaatcagcatgttgagattttataatatctttgggagtgggttggtaatcatggatttcggcaccaggtttagtaattgattcaacaattgctgcatcacccgctacattttgtgcgatatcttgaatgatagtaaaggtcgtgacaactttaaattgtttggcggcggataccggatgactaaatagaatgacagataagagaatcaacataattcccagaacaggaggcgaaagtaacagcagagaaagttttttcttcataaattcaaaccttacttgttataagtatatgataacgattatcaatatcatttaagtaaagtcaagatgataaaatttggaaacaacgattgttgcgatagtcatcccatatgatatgaacatgaatacagtgaaaagttaagtaaaaatatttttagattgtaaacgaaattgtatatgctgcgctttagtaacatttgatccagaggattatagggtgaaattaaaactgagctttgtggcactggtcgtgctgttagtcggttgtgctgagagaaatgttcagcaaacaaatgttggcaaacagtccggtcagcaacgtatgcttagcaatactgccaacgcagctagaatttcttcttctttctcgccgacgccttttgatacctttattcaacaagcatccaatcggtacggtgttgatgaaacgctgatcagagcgattattcaagttgaatccggttttcgtcctaatgcagtcagtaaatcgaatgcaattggccttatgcaaattaaagcatcgacagcagggcgggatgtgtatcgacagaaagggcgttctggtcagccaacaacacgtgagttgaaagatcctaaaactaatattgatcttggcacggcttatatcagtatcctgaaagagcagcatctggcaggtattgataaccctgaaactctctactacgccactattgttgcctacgtaaatggtgcgggtgctcttttacgtacttttaatgcagatcgtcaattagccgttaataaaataaaccgcatgacgccggatgagttttatcagtatgttcaggataatcatccagcccctcaggctccacgctatttgtggaaggtgaaaaaggcttatcgttcgttagtaatggtagattgagtcgctggtaaaaatgacgattctatttgcgacaacctcacattggacaagggcttacggcagttttggctaaatttaactgcgaaaggcttgcactcaatctgtagtggattctggaagataaaatgatcccttctttgatgctaattgtggaggagggggctttaatatatgtgttcactggtgtttacaagctaaaaggtatgagacctcatttcaatttacatcatgcgatggtaaatatcgtttgatatccgataattcatatctaaagaagggctctcttcgaatatgtttcttaatgatcaatacggtatttaaccaatgttgaactcagctatattataacaaaacaatatagctagattgattctaattagaaattgttttcttatggggttaaagataactaacttctacattaactatagcgatttattaccattaaataacatgtactaaaattgattttagcctgaacttatattttaaagtaattaaatatacggggtacctttgtaaatgtttaataaattgtactttatgtggcattttatctgcaccttgtttgaaggggaactgttatttttcaataaattacctaattttcccgtgttaatgttaatagtcgttgatgattttagtctaagctatggaattaagtgtcaatcaaaagtgcttatccaaaaaataaggatgaaatagaacatatagttacgtttcatgaataaccatttcccgttcttaggaaagttatcattacagaattgctaataattaagttatttacatccaattccagagagaaagcatttcctgagtattttaattaatgcttaacgtacccgtttttatttcaccgagggtgggtgggacaacagttaagaaaaaacacttgtgacgactgtcaagaatgacagttgccaaatatctaacagatttgttgaggtagtagatgaaagacagcattactaaaaaagcggaaagtatccttaaagccgaacttctctctcagacaccagaaaatataaccaataacgtaaagaatatacctgctctgccacgtagctgcatcatagtcgggggaacgactcttgcggtgttctgtgccgaacaaattcaggcggctgggcatacgatacaagcaatgctgactaccgataccgttctgcaaacatgggctgccgggcaagggatcgtttgtgtgaattccgtcgaagcattacaagcacaaattgcgcaacaccctgtggactggcttttctcaatcgttaatccgattatcctgcctgtatcactgattgggcagattcgcggcggcgcttttaattatcacaatagcccactaccacgttatgcgggcagtcatgcaacttcttgggcgctgttagcacaggagacacactatgccgtttcgtggcattgcattgaggagggggtagataccggtgatatcgccgtgcaatggccagtatctattgaggagcacgataatgcgttttcattgaatctgaaatgctatcaggcggctcaggaagggtttattaagttgcttcgggatcttgatcagggtgagttggtgactcatccgcaagatctgacacgacggagtttttatactcagtctcgtcgtcccgatggtgggggatatttgtgttggcagcagccgggtgaggcactttcagctttagtacgcgcgttagattttggcgaaaattatttaaatccactgggttgcccgaaactgttactgaaatggggcacagtacggatttcctggcttcaacggctgaatcactattctgggggggcacccggtacgttgattgctgtagaagaggatgcttggcaggtaacaaccggaagtgaggatgtcaggatcggagggtttgccgcacttgagggtaaattactctccgccggggagcttgccgatatatcagaactcaagccgggcaaacagttgcctctgctttcttcgcaacaggctcagaatgtaaaagatatcctccaggcacttgcacccagtgaatcattctggcgtgagcgtcttgcctctttgataccgctgcaattacctttcgaaactgccggaaaatcagcagcccctaaatgggcattaagtgcctggcaatctccgctattagaaaatagtgaaaagttaaaaaatggtgaaaaagccccattgccgatactgttacagacattcgctatttatcttgcgcgtttgactcatcagaccgaattccaaatcggctggtgtgtggatagggtgaaaaatgaaccagacctgttgtctggtttggcgccggtggtgccaatgactgttaaggtggagtttgatcagccatggtgtacggtagcgaactggatgaatgatgagtttgcacggctggtgcagcatcgtacattttgccgcgatctcctttctcgttctccttcactgtgtgctatctcggcattaacaacaagccgcccgtggcgagttgcggtctctttcataccggatgacaagccgtgggagcagaatgcgttaggtgaattgttgacactccagatgaatactcagggtggttttcgctggatctacgatacaaaccgtttgagtgcggaagtggttcagcggatgagtgaacatttacaggtgttgtcatcatcggcggaagaaaaggatgatattcccgtctggcaacttaatttgttgcctgaagctgaacgcacgctgctactggaaacctggaatgcaacccaaacacgataccctgaccaaacatgtattcaccggttgtttgagcaacaggcagagaaaaccccggatgccacggcgctggtgtatgaagaacacattctcagttatgccgaattaaatgcccgtgctaatcggctggcgcatcaactgataacgttgggagtcgcaccagagcagcaggtggcaatttgtgtcgcgagttcaccggcgcggatcgtgggactgctggcagtactgaaagccgggggggcctatgtaccgctagatccggcttatccgggggaacgtctggttcatattttaaccgatgctgtgccagctattgtgctggcagataatacgggacgtgccgcgttaggcgaaaaagtgctggcagcgttaactgtactggatccgaatagtttgcctgatcagccggatagcaacccgcaagtatcggcattaaccccacgccatctggcgtatgtgatttatacctccggttcgaccggcataccaaagggcgtgatggttgaacaccgtgggctggttaacctgattcaggaaaaaatcgttcagtttgagattcatccgggtagccggatgttgcagtttgcctcatttggttttgatgcgggtgtctgggaaaccatgatggcattgtgcagtggggccactttggcgatcccggctgatacggttcgtcaggagccccgttatctctggcattatctggaagagcaggcgataactcacgcctgtctgaccccggccctgctccgggaggggactgatttaccggaaatgacgataagaccgacgctgatactcggtggtgaggcacccagcgcaacgttgcttcaagccctgagccgtcgggcaacggtgtttaatgcctatggcccgacggaaatcacggtgtgtgcgaccacctggcgttgtccgtcagactacactgagggtgtcattgcgattggacgtccgacagttaacacacaggtttatttgctgaatactgacggccagccggtgccgttaggggcagtcggagagctctatattggtggtatcggggtagcgcgaggctatctcaaccggcctgatttgacggcggaacgttttctggccgatccatttagcgataagccggatgcccgtctgtaccggaccggggatttagcccgctacctgccggatggcaatctggaattcctgggccgtaatgaccagcaggtgaaaatccgcggttttcgcattgaaccgggggaaatcgaagcccgattaatggaacacccggcggtgagcgaagcgctggtgctggctttgaacgatggtcaggataaacggttggtggcttatgtgatggcagaagcggatgaccagttggttaacagcttgcgtgcctatctgagtgccattttaccggattacatggtgccgacagcctttgtacgcctggataccttcccgttgacgccgaacggcaaactggatcgccgggcactgcccgcgccgggggaggaagcttttgcccgtcaggcttatgcagcgccgcaaggggagacagaatctctgttgtctgctgtctggggtgagttgttgggcattgaacaggtgagtcggcatgacagcttctttgctctgggggggcattcattgctggcggtgcggatggttgaacgtttgcgtaatgcggggttaacgttggcggtacgtgatttattccaatctccagtgttatctgaatttgcccaaacagtagggcagtcacaggcggtgatagtgccggcaaatatcatgactcctgcgatcacagcactgacacccgagatgttgccgttgattgatctcactcagtctgagattgaccatattgtggcgcaggtaccgggtggggttgccaatattcaggatatttatggtttgtcaccgttgcaggacggcatcctgttccaccatctgctggcgaataaaggtgacccgtatctatttgttagcaagatggtttttgctgaccgcgccctgttggatagctatttagtggcagtgcaacaagtggttaatcgccacgatatcctgcgtaccgcctttgtttggcaaggattatcagcgccggtacaagtcgtttggcgtcaggcgcaattatcagtcactgaattgacattagacccggttgatgggccggtccgtgatcagttagctcagtattttgacctacatcaccatcgcctcgacttgaaccaagcacctttgttgcactttggggtagcgcaggaggaggatggtcgctggagcgtactgcaattgctgcatcatctgattggcgaccatacgacgctggaagtgatgaacggtgaaattcaggcttatcttgccggacaggaagggaacttacctgtgccgatccctttccgcaatctggtggctcaggcccggttgggggtgagtcaagccgaacatacccgcttctttactgagatgttggctgaggtggatcaaccgacgctgccattcgggttgatggaggtacatcgggatggttctcaggtgacggaatcgtaccggatgttacccgctacattgaatgaccgtctgcgcagtcaggcccagcgtctgggtgtcagtttggcgactttgtgccatttggcctgggcacaggtgttgtcacataccagcggacaggagaaagtggtgttcggcaccgtgttgtttgggcggatgcaggtagggcaaggcgctgacagcggtatggggctgtttatcaataccttgccgttacgactggatataaatgatgcttcggtacaggacagtgtacaggctgtgcatacccggctggcggaattgctggatcatgaacatatgtcactggcattggcccagcgttgcagtagggtgccaggggaaattccgctcttcagtgctttgctgaactatcgacataatgatcaaccgacattcccaaataaagaggtgccaggtattgaattcctaggcgcacaggaacgaaccaactatccgtttgtgctgtcagtagaggacggtgggtctactttgggattgactgctcaggtagtgcagccgtttgagtcggaacgagtatgcggttatatgcaacaggcgctggaaagtctggctgaggcccttgaacagcgtccggagacaccggtacgaacactgaatatcttgccggcagcagagaaaaagctgttgctggaaacttggaatgcaaccgcaaccgaaacgtcgtatccagatcacagttgtattcaccgactgtttgaacaatgggcaaagaaaagtccggatgccacagcactggtgtatgaagaacagatcctcagctatgccaatctcaatgcctgcgccaaccgtctggcgcatcaactgatcgcgttgggagtcacaccggaccaacgggtggcggtttgcgtgtcacgttcaccggcaatggtggcgggggtattagccgtgctgaaagcgggtggagcttatgtgccgctagatccagcttatcctagtgcgcgtttggcacatattctgaccgatgctgccccggctgttgtgctggcggataaggccggcaaggttgcactgggtgaggaagcacttactggactaacggtactggaccccaatattttgcctaaccaagtagacagcaacccgcagatatctggactgacttcgcgacatctggcttatgtgatttatacctccggttccactggggtgcccaaaggggtgatgattgagcaccgcaatacggttaactttctgtattgggcccagcaggcttttgaaacggaagagatccgggaggtgcttttctcgacgtcaatgaatttcgacctgtccatttttgaatgttttgtgccgttgtcccaaggggcgacaattcatctggtggaggatgccctgtcattgatgcagcatgccctgccggtgaccttgatcaactcagtcccgtctgcgatgaaaccgttattgcaggctcaggcgctgatggcgtcggttcataccgttaatctggcgggggaaccgcttaaaggtgccttaattgaacagattttcgaaaaaacgcaaatacaacggttgtgtaatctctatggaccttctgaaacgacaacctattctgcctggttgccaatacagcggggtgacaggattattgaaagtatcggccgtccgatagccaatacccgcctttacttactggacgagaatggtcagccggtaccgttgggcgtggtgggggaaatttatattgggggggcgggagtggcacgtggctacttcaatcgccctgatttaacggcggaacggttcttgattgatccgtttagtgatgtgccggatgcccgtatgtaccgtaccggggatttggctcgttattttccagacggtaatttggagttcctgggccgcaatgaccagcaggtgaaaatccgtggtttccgcattgagccgggggaaatcgaagcccgattaatggaacacccagcggtgagtgaggcggttatactggcactggatgatgatcaggataaacggttggtggcttatgtggtggcagaagcggatgaggtattgattaaccgtctgcatgcgcacttaagtgcggttttaccagattatatggtgccagccgcttttgtctgtctggatgccttcccgctgacgccaaatggcaaactggatcggcgggcattaccagccccaggggaagaagattttgcccggcagatttacgctgcaccgtcaggggagatggaaaccacattggcggctatctggcgtgaattactcggtgttgagcggatcagtcggtatgacaactttttcgcactgggtggtcattcgctgttggcggtgaggatgatgaatcggatagccgcgttggggattgaattaccgctgtccacactgtttacattcccgtctttgatagcttttgctgaagtgatgcgtacccagtttgatgagtcaggcgcggcattgcccgctatcgttccgctatcccgtgaggatcaccaattgccgttgtcatttgcgcaacaacggctttggttcctggcccagcttaatggagtgagtgagacctatcatattccattggccctgcgtttgcgtggtcgattggatatcaccgcttggcaacaggcgcttgatacgctgtttgcccgccatgaagcattgcgttctgtttttgttgctgttgacggccagccacaggtggaattgttgccggcggcatcaagcttgctgatgaaaaaatatgatctgcgtgacacgcctgatgtggatgaccagcttgcgtttctctctgctcaggaagccagtgcgccgtttgatcttgcccgtggcccattaattcgttccagtctggtacaactggctgacgatgaacacgttttcttgctgacccagcatcatattgtttccgatggctggtctttagggatactaaaatcagaattggaggcgctttattcggctcacttgaatcaacagccggatccgttgccaccgttgacaattcagtaccctgattacgccgcctggcagcgtcaatggttgtcggctgaacgcatacagtcccaatctgattattggcgcgcgaggctggttgatgcaccggttctcctggatttgccgactgaccggccacgtccgcctcagcagtcgtttgccggggccttattgcccgtcaatctggatgcggagttaacccaatcccttaagcgcctgagtgagcaacagggtgtcacgttgtttatgaccctgttggcggcctggacagcagttctatcgcgcctgtcaggtcaggaagatttggttgtcggtacgccaagcgcgggccgtagtcggcaggaagtagaatctttaatcggtttctttgtgaatacgctggcgttgcggatggatttatccggtgcaccgaatgtgacggaattgctggcgcgcgtacgacaaactgcactggcggcacaggaacatcaggatctcccgtttgaacaggtggtggaaattgtgcaaccgccgcgccgactagcgcatactccgctatttcaggtgatatttgcctggcagaacaatgaaaacatagaatggcggttgccagggttggcggtttcacttgcggatcaacctattgatatcgctaagtttgatcttgaattgagcctgtctgaagtggacggcagagttgtcggttatctgaattatgctacggcgctatttgatcaagcgaccattgagcggcaggtgggctatctccataccgtattgcgggggatggcaactaaccctcaacagccggtcgggaaaatcgatatcctgaccgtgacggagcgcaagttgttattggaaacttggaacgcgaccaaaacgtcgtatccagatcacggttgtattcaccgactatttgagcaacaggcagagaaaacccctgatgcgatagcgctggtgtatgaaaaatacattctcagttatgccgaattaaatgcccgtgctaatcggctggcgcatcaactgataacgttgggagtcgcaccagagcagcgggtggcaatttgcgtcgcgagttcgccggcgcggatagtgggactgctggcagtactgaaagctgggggtgcctatgtaccgctagacccggcttatccgggggaacgtctgattcatattttaaccgatgctgcccccgctattgtactggcagataatacgggacgtgccgcgttaggcgaaaaagtgctggcagcgttaactgtactggatccgaatagcttgcctgatcaaccggatagcaacccgcaagtaccggtattaaccccacatcatctggcgtatgtgatttatacctccggttcaaccggcataccaaagggagtgatggttgaacattgtgggctggttaacctggttcaggaaaaaatcgttcagtttgatattcatccgggtagccggatgttgcagtttgcctcatttggctttgatgcgggtgtctgggaaaccatgatggcattgtgcagtggggccactttggcgatcccggctgatacggttcgtcaggagccccgttatctctggcattatctggaagagcgggcgataacccatgcctgcttgacaccggccctgctccgggaggggaccgatttaccggaaatgacgataagaccgacgctgatactcggtggtgaagcacccagtacaacgttgcttcaagcactgtgtcgtcgggcaacggtgtttaatgcgtatggcccaacagaaattacggtgtgtgcggccacctggcgttgtccgtcagactacactgagggtgtcattgcgattgggcgtccgacagctaacacacagatttatttgctgaatactgacggccagccggtgccgttaggggcagttggtgagctctatattggtggtatcggggtagcgcgaggctatctcaaccgacctgatttgacggcggaacgttttctggccgatccgtttagcgataagccggatgcccgcctgtatcggactggggatttagcccgctatctaccggatggcaatctggaattcctaggccgcaatgaccaacaggtgaaaatccgtggtttccgcattgaaccgggagaaatcgaggcccgattgttggagtacccagcggtgagtgaagcgctggtgctagctttaggtgacggtcaggataaacggttggtggcttatgtagcagcagaagcgaatgaagagttggttaaccatctgcgtactcacctgagcgccattttgccggattacatggtaccggcagcctttgtacgtttggatgccttcccgttgacgccaaatggcaaactggatcgccgggctctaccagcgccgggggcggaagcctttgcccgtcaggtttatgcagcgccgcaaggggagaccgaaaccctgatggctgctatctggagcgagttgttgggcattgaacaggttagtcggcatgacagcttctttgccctaggtggtcattcattgctggcggtgcggatggttgaacgtctgcgtaatgcggggttaacgctggcagtacgtgatttattccaatccccagtgttatctgaatttgcccaaacagtagggcaatcaccggtggtggtggtgccggcaaatgtcattaccccggcgctcacaacacttacacccgaaatgttgccattgattgatctcactcagtctgaaattgaccatatcattgaacaagtaccgggtggggtggccaatattcaagatatctatgccctgtcaccattgcaggacggcatcttgttccaccatttgctggcgaataaaggtgacccatatctattggtcagccaaatgatttttgctgatcgttcgttgttggatcgttatctggcggcagtgcaacaggtggttaatcgccacgatattttgcgtaccgcctttgtttggcaaggattatcagcgccagtacaagtcgtttggcgtcaggctcaattgtcagtcacggaactgacattagacccggttgatgggccggtccgtgaccaattagctcaacattttgacccacgccatcatcgcctcgacttgaaccaagcacctttgttgcattttgcgatagcgcaggaggacgatggtcgctggagtgtactgcaattgctgcatcacctgattggcgaccatacgacgctggaagtgatgaacggtgaggttcaggcttatcttgcaggacaggaagagagcttgcctgcgccagcccctttccgcaatctggtggctcaggcccggttgggcgtgagtcaggctgagcatacccgcttctttactgacatgctggcagaagtggacgaaccgacgctgccgttcgggttgacggaggtatatcgggatggttcgcaggtgacagaatttcaccgaatgttacctgctacgttgaatgaccgcctgcgcagtcaggctcggcgtctggacgtcagtttggcgactttgtgccatttggcctgggcacaggtgttgtcgcgtaccagtggacgggaacaagtggtgttcggcaccgtgctgtttgggcggatgcaggctgggcaaggcgctgatagtggcatggggctgtttatcaataccttaccgttacgattggatatggatgagacctcggtgcaggacagtgtgcggttagcccatacccggttagccggattgctggagcatgaacatgcttcactggcactggctcaacgttgcagtggggtattgggggaagtgcctctctttagcgcgttactgaactaccggcatagtacgcagccggttaccacggatgcaatcatcagcggtattgaattccttagcgagcaagagcgcactaactatccgtttgtcttgtcggtagaggattttggtcatgcactggggctgacgacgcaaattgttcaaccgattgatccagagcgaatatgtggttatatgcaacaggcgctggaaagtttggtggaagcacttgaacaggcaccggaaacaccgatacgggcattgaatatcttgccagcagcggaaaaaaggttgttgctggagacttggaatgcaactcaggcgccatatcctgaccaatgttgtgttcaccagctatttgaacaacaggcaggaaacacgcctgatgcgatagcgctggtgtatggagaacacattctcagctacgccgaattaaatgctcgtgccaactggttggcacactggttaattgggcaggggatccagccggatgaccgggtcgctgtgcagttagaacgttctattgaactggtggtggctcaattggctatcctcaaggccggggctgtttatgtaccgatcgatccccgcgtaccggatgaacggaagcactggctgataagcgactgtgcagccaaattattgcttacggatatcccggttgacttggccgataagatcggcgctatcagtggggaagattaccccaatcctgacttgccccgcatcagtactgagctggcttatattatgtatacctccggctcgactggtaccccaaaaggggtgttggtaccgcatcgtgcggtggcccggctggtcatcaataatggttatgccgaaatcggaccagatgatcgggtcgcgtttggagctaacccgtctttcgatgccagcacctttgaagtttgggctcctttgctgaatggtggtacgttggtggttattgatcatgccactgtgctaacgcccaaagagtttgccctggcattacagacttatcgcattactgtgttgtggttaagtgtcgggctatttaaccggctggtagcagagttgtccccggttctcccgcagctcaaaatcctgattgtcggcggtgatgtgctagatcctcatgtgatggcgcaagttctacgtgataacccgccgcaacagttattaagtgcttatggacccagtgagggcaccacctttaccaccacctactgtattacagcgttaccgtcggtagtggcgagaatccccattggccggccgatagccaatgcacgcatttatctgctggatacttacggtcagccggtaccgttgggtgcgatcggtgagatttatgtggggggagatggggtcgcttgtggctatcttaatcgtcctgaccagactgctgagcgtttcctgacagatccatttagtgatcaaccggatgcccgtatgtacaggactggggatctggcccgttatctaccagacggtaatttggaatttctgggccgtaatgaccaacaggtgaaaattcgcggtttccgcattgaaccgggggaagttgaagcccgattgctggaacacccggcagtgcatgaagcggttgtgctagtggtggatgacggtcaggacaaacggctggtggcttatgtggtggcagaagcggatgagatgctggttaaccatctgcgtgatcacttaagtgcggtgttgccggattatatggtaccggctgcttttgtctgtttggatgccttcccgctgacgccgaacggcaagctggaccgtcgggcgctaccggtaccgggggaagaagattttgcccggcaaatttacgctgtaccgtcaggggaaatggaaaccacattggcggctatctggcgtgaattattgggtgttgagcggattagccggtatgacaactttttcgcactgggtggtcattcgctgttggcggtgcgaatgataaaccggatagcggctttggggatcgaattaccgctgtctacgctgtttacattcccgactttgatggcttttgctgaagtgatgagtgcccggtttgatgagtcaggcgaggcattgccagctatcattccgctatcccgtgaaggccaattgccgttgtcatttgcgcaacagcgtctgtggctcctggcgcagtttgagggggtgagtgaaacctatcatattccgctggctctgcgtttgcgtggtctgctggatatcgccacctggcaacaggcgcttgatacgctgtttgcccgtcacgaagcgttgcgctctgtttttgttgctgttgacggccagccgcaggtggaattgttgccggcggcattaggttggccgatgaaaaaatatgatctgcgtaacacacctgacgtggatgcgcagcttgcctctctctctactcaggaagctggtacgccgtttgatcttgcccgtggtccattaattcgttctgctctggtacaactggctaatgatgaacatgtcttcctgctgaccctgcatcatattattttcgatggctggtctgtcagcgtattgatgtgtgaattgaacgccctttataccgcttttcttaccgggcaaccggatccgttgtctccgttgacgattcagtatcctgattacgccgcttggcagcgtcaatggctatcggctgaacgcatacagtttcaatctgattattggcgcgcgagactggttgatgcaccggttctactggatttgcctactgatcggccacgtccacctcggcagtcatttaccggaaatatcttgcccgtcagtctggatgcggagttaacgcaatcccttaaacgcttgagtgagcaacaaggtgtcacgttatttatgaccctgttagcggcttgggcgacggttttatcgcgcttatcaggtcaggaagatctggttatcggtacgccgagtgccggtcgcagtcggcaagaagtggaatccctgattggtttctttgtgaatacactggcgttgcggatggatttatccggtgcaccgaatgtaacagaattgttggcgcatgtgcgacaaactgcattggcggcccaggagcatcaggacctaccctttgaacaggtggtagaaatcgtgcaaccgctgcgccgattagcgcatactccgctatttcaggtgatatttgcttggcagagtaatgagaatgcggaatggcaattgccgggactgacggttttacctgccgatcaactcatcgatatcgctaaatttgatcttgaattgagcctatctgaggtggacggaagaattgtcggttatctgaattatgccactgctctatttgatcaggcgaccattgagcggcaggtgggttatctccataccgtattgcgggcgatggtggctaaccctcaacagccagtcgggaaaatcgatatcctgactgtagcggaacgtaagctgttattggaaacctggagcatgaccgaaacgtcgtatccagatcacggttgtattcaccgactatttgagcaatgggcagagaagaatccggatgctacggcactgatgtatgaagggcaagccatcagttatgccgaattaaatacgagtgctaatcggctggcgcatcaactgattacgttgggtgtggtgccggatcagcgagtggcgatttgtgtggcgcgttcaccagcaatgatagtcggattgttagcggtgctgaaagcgggtggtgcttatgtgccactggatccggcttattcgggcgagcgtctggggcatattctggttgatgccaaaccggctattttgttggcggataatactggacgtgctgcgttgggtgagaaagcacttgcagacttgattatgctcgatccgaatatcctgtttgaccaagcggacagtaatccgctgatacctgaattgactgaacgacatttggcctatgtggtttacacctcgggttcgactggcacgccgaaaggggtgatggtggaacatcgtggggtagttaacttggctctggctcaaattacccggtttagcgttgatgaaaccagtcgaatattgcaatttgcctcatcgggttttgatgccagtgtctcggagatcatgacagcgttaagtggcggggcctgtttggttattcctaccgatattatccgccaggacccgcgtcgtctttggtcttatctggaaaaacaagcagtaacgcacgctttcctgccaccggctctgttccgggaagagagcgatttaccggtaataacgataaagcctacgttaatatttgcaggagaagcaccgggttcaaccctgttccgggcgttgtgtgatcgggtaaatttgttcaatgattatggcccgacggaaattacggtttgcgccacctcttggtcttgcccatcagactatacggatgcatgggttcctattgggcgcccaacaaccaacacacgggtttatctgctggatacttatggtcagccggtaccattggggacggtgggggaactgtatatcggtggcgtaggtgtcgcacgtggttatctcaattatcctgagttgactgctgaacgtttcctaactgatccgttcagtaatgaacctgatgcccgcttgtatcgcaccggggatttggctcgttacctgccggacggcaatctgatattcgttggtcgtaacgatcaacaggttaaaatcagggggttccgtattgagccgcaagaaattgaagcgcggctgatggagcatcctgcggtaagtggagcattggtactggcgttaagtgacgggcaggacaaacggctggtggcttatgtagtggcagagccagatgacggattgacggcgagcttgcgtggatatctgagtgctattttgcctgattatatggtgccggccgcttttgtacgcctgaataccttcccgctgaccccaaacggcaagctggatcgccgagcattacctgcgccgggggcggatgcttttgcgcgtcaggtttatgccgcgccgcaaggggaaacagaaatcctattggccactatctggagcgagttgttgggtattgaacagattagtcggcacgacagcttctttgccttgggcggccattctctgcttgcagtgcggatgattgaacgtctgcgtaatgcgggattaacgctggcggtgcatgatctattccaatccccggtgttatcggcatttgccgaaacagtagggcagtcacaagcggtggtggtgccggagaatgttattaccccggcgaccacggcactcacacctgagatgttgccgttgattgagctgacccaaactgagattgactatattgtgcaacaaatgccgggtggaatagttaatattcaggatatctatgccctgtcgccgttacaggacggtattctgttccaccacttattaaccaatgaaggcgacccgtatctgttagtcagccagatggcctttgctgatcgttcgttgctggatagttatctggtggcggtgcaacaggtggttaatcgccacgatactctgcgtaccgcctttatttggcaaggattatctgcaccggttcaggttgtttggcgtcaggcaccgttatcagttgtggaactgatattagatcctgctgacggaccggtttatgagcaattggctcaacgttttaatccgcgtcagcatcgtctcgatctgggccaagcgccactgttacgttttgttattgcacaggaaatggatggtcgttggattgcactgcaattacagcatcatttgattggcgaccatacgacactggaagtgatgaaccgcgaagttcaggcgtaccttaccgggcaggaagagagcctgcctgtgccggcccctttccgcaatctggtggctcaggttcgtctgggggtgaatcaggccgagcatacccgcttctttactgacatgttagctgaggtggatcaaccgacgttgccattcggattgacggaagtacatcgggatggttctcagatgacccaatcgtaccgaatgttgcccgccatactgaacaaccgcttgcgtagtcaggcccggcgtctgggtgtcagtctagcagcgctgtgccatctagcctgggcacaggtattgtcgcgtaccagtggacaggagaaagtggtattcggcaccgtattgtttggacggatgcagacagggcaagggactgacagcagtatggggctgtttatcaataccttgccgttacggctagatatggatgataccccagtacgagggcgtgtacaggcagcacacgcccggctagccgagttactggagcatgaacatgcttcactggcgatggctcaacgttgcagtgggatacaaggtgaagttccactctttagtgctttgttgaattaccggcatagtgcgttatccgcgacttcgaatgaaatcatgaatggtgttgagtttcttggcgcgcaggaacgtaccaactatccgtttactctatcggtggaggattttggtaatgcgttggggctaacaacgcaaattgtccagccatttgatccggaacgggtgtgcggttatatgcaacaagcgctggaaagtttggcagaaacacttgagctggccccggaaacgccggtacggacgttggaaattttgcccgaggctgaacgcactttgttattaaaaacctggaatgagacagaaattgcctattctgacccgctgtgtatccatcaattatttgaacaacaagtggagaaaaacccggacgccacagcactggtgtatgaagaacagacgtacagctatgcggaactgaatacccgcgctaaccgactagcccatcaactgattgcgctgggtattgtgccagaccagcgagtagcgatttgcgtgacacgttcaccgacgatgattgtgggcttgctggcggtgttgaaagcgggtggtgcctatgttccattggccccggcttatccaggggaacgtttggcacatattttgaccgatgcagcaccggctattttgctggcggacaatgtcggatgtgccgcattgggtgaggaagcactgtcaggactcacggtactggatccgaatacgctgcctgataagccggacagtaacccgcaagtgaccgcactgactgcacagcatctggcgtatgtgatttacacatcaggttcaaccggtacaccaaaaggtgtgatggttgagcatcgtgggctaatcaatcttgtccgggataaaattgcccagtttgacattcactcagatagccggatattgcagtttgcctcattgagctttgatgccagtgtttgggaaatcatgatggcgttgggaagtggggcctgtctggttatcgcagtcgatatcgtccggcaggacccgcttcgtctctggcattatctggagcaacaggtagtgacccatgcctgtctgaccccggctctgcttcgggatggaggagatttaccggcgctaacgataacaccgacagtgatattaggcggtgaagcacctagcgcagcactatttcagacactttgtcgccgggcggcgctgtttaatgcctatggcccgacagaaatcacggtgtgtgcggcgacttggcgttgtccaccagactacacggatacgttagtgcctatcggccatccgacggcgaacacccagatttatttgttgaatagcgacggccagccagtgccgttgggggcagtaggtgagttgtatgtcggtggtgcgggggtggcgcgtggctaccttaatcgtcctgaactgacggctgaacgctttttagctgacccatttagtgagatgccgggtgcgcggatgtatcggaccggcgatttggcccgttatctgccagatggcaatttagtatttgttggtcgtaatgaccagcagattaaaattcggggcttccggattgaaccgggtgaaatcgagacccggttgacagagtaccctgcggtacgtgaagcggtagtgttagcgcggggtgaggagcatgataagcgtctagtggcttgggtggtggcagaagaaaacgatgaattggcgaatagcctgcgtactcatctgagcacaattttgccagattatatgatgccggcggcttttgtccgtttggatgcactaccgttgacgccgaatggaaagctggaccgtctagcgttaccggcaccggacgaagaagccttttcccgccagatttacgaagcgccacaaggcgaaacagagatagcactggccgctatctggcgtgagttactggggattgagctggtgggacggtatgacagtttctttgctctgggcggccattcgttattggcggtgaggatgataaaccgaatggcggctttaggcattgaattgccgctgaccacgttgtttaaatcaccgacgttggcagattttgctgaggtaatgagggctcagcttggtgaacagaacaatagtgtgtctgctatgctgccgatatcccgagagggtgcattaccgctgtcatttgctcaacagcgtctatggctcctgacccaatttgaaggggttagccagacttatcatgtcccaatggctctgcgtttacatggtcagttggatatcgctgcttggcagcaggcgctgaatcgcttgtttgcccgccacgaggctttgcgttccatctttatctcggaggatggtcagcctcaggtcgaattgttgccggctgaattgggtttgccgatgagcaaacacgatttgcgtaaagtgtttgatgcagataaacgacttgagcgtttatgtgtacaggaagcggaggtgccgtttgatcttgctggtggtccgttaattcgagcgggtttgatacaacgtgctgacgatgattatgtctttttgctgactcagcatcatattgtgtcagacggctggtcggctggcgtgttgatgcatgagttgagtgccctctataccgctttttcaatggggctgccagatccgttacctccactggcaattcagtatcctgattatgctgcctggcagcgtcagtggctgtcggcggagcggttacaaatccaatctgactattggagaatgagtctggcagatgcgccagttctactggatttgcctactgatcggtcacgtccatctcagcagtcgtttgccggggctttattacccgtcaatttggatgcggagttaacccaatctcttaaacgtttgagtgagcaacagggagtcacgttatttatgacgttgctggctgcttgggcaacagtcttatcacgcctatcaggccaggaagatctggttatcggtacgccgagtgccggtcgcagtcggcaggaagtggaatccctgatcggcttttttgtgaatacactggcgttacgcatggatttatccgattcccccaatgtggcggaattgctggcgcgagtgcgacaaactgcgctggcggcacaggagcatcaggatctcccgtttgaacaggtagtggaaattgtacaaccaccacgccacttggcacatactccgctgttccaggtgatgtttgcttggcagaacaatgaaggcatggaatggaagatgccgggactgacggtttcacctgccgagcaacgcattgatatcgctaagtttgaccttgaattgagtctgtctgaagtagacggccgaattgtcggttatctgaattatgccaccgccctgtttgatcaacttaccattgagcggcaggtgggctatctccataccgtactacgagagatggcggctaaccctcaacagccggttgggaaaatcgatatcctgaccgtggcggaacgcaaactgttgctggaaacctggaatgcaacccagacgcgatatcctgaccagacatgcattcatcggttgtttgaacaacaggaggagaaaacccctgacgcagtagcgctggtgtatgaagaacacattctcagctacaccgaattaaatgctcgcgctaaccgattggcgcgccagttaattaagtgggggatacggtcagatgagcgggttgctgtgctgttagaacgttccattgagctgatcgtggcccaattggcaattctcaaagccggggccgtttatgtgccaatcgatccccgtgtgccggacgaacggaaaaactggctgataaacgactgttcagccaagttattgcttagcggtatcccggttgatgtggcgatcccccggttttctctaactgatgagatgatcactatcgaagaagaagatcaccgcaatcttgacttgcctcgctccagtaccgacttggcctatatcatgtatacctctggctcgaccggtacacccaaaggggtaatggtgccgcatcgtgcggtggttcgactggtcatcaataacgggtacgctgaaatcgggccggatgatcgggtggtgtttgaggccaacccggctttcgatgccagtacctttgaagtctgggcaccattgctcaatggcggtacgctggtggtgattgatcacactacgttactgacgcctaaagaatttgttcaggcattacagacttatcgcattaccgtactatggctgagtgtcgggctgtttaaccgactggcgacagcgttgttcccagtgctgccacaaatcaagaccctgattgtcggcggcgatgtgctggatccgcatgtgatggcgcaggttctgcgtgatagcccgcctcaacagttattaaatggttatggaccgagtgagggcaccaccttcactaccacctaccgcatcacggcattatcaccggaagtgagccggatccccattggtcgaccgatagccaatacgcgggtttatctgttagatacctatggtcagccagtgccacagggggtaactggtgagatttatatcggtggagatggggttgcctgtggttatctcaatcgccccgaactgaccgcggagcgttttctgccggatccgtttagtgataaaccggatgcccgcctgtatcggaccggggatttggcccgttacctgccagacggcaatctggagtttctgggccgcaatgaccagcaggtgaaaatccgtggtttccgtattgaactaggggaaatcgaagcccgattgctggaatacccgttcgtgagtgaagcggttgtgcaggtgatgggcgacggtcaggacaaacggttgatagcttatgtggtaacagaagcggatgaggagttagttaaccgtctgcatacccacctaagtaccattttaccggattatatggtgccgacggcctttgtacgtctggatactttcccgttgacgccgaacggcaaattggatcgtcgggcattaccggcaccgggggaggaagcttttgcccggcaagtttatgaagcaccgcagggagaaacagaaatcctattggctgctatctggagcgagttgttggggattgaacagatcagtcggcacgatagtttctttgccttgggcggccattctctgcttgcggtgcggatgattgagcgcctgcgtaacgtggggttaacgctggcggtacgtgacctatttcaatctccgatgttatcggcatttgcccaaacagtaggccaatcacctccggtggtggtgccggcgaatgtcatcaccccggcgaccacggcacttacacccgaaatgttgccgctgattgagctgacccagcttgaaattgaccatatcgtgggacaagtgccgggtgggatggctaatattcaggatatctatgccctgtctccgttgcaggacggtattctgtttcaccatttgttggccaatgaaggtgacccgtatctattggtcagccaaatgacttttgatgatcgcgccttgttggatcgttatctggcagcagtgcaacaggtagtgaatcgccacgatattctgcgtaccgcctttgtttggcaaggattatcaacgccggctcaagtggtttggcgtcaggcaccattatcagtcactaagctgacattggacccagttgatgggccggtccgtgaccagttagctcaactttttgatccacgtcgctatcgtattgatctgcaacgagccccattgttgcactttgtggtagcacaggaggaggatggccgttggagcgtactgcaattgctacatcatctgattggcgaccataccacaatggaagtgatgcatggcgaagttcaggcttacctagtcggacaggaagagaacttgcctgtgccagttcctttccgcaatctggtagctcaagttcgtttgggggtgagtcaagccgaacatacccgcttctttactgacatgttggctgaggtggatgaaccaacactgccatttgggttgacggaggtacatcgggatggttcgcaggtgacggaatcgcaccggatgttacctgttaggttgaacgatcgtctgcgcaatcaggcccggcgtctgggtgtcagtttggctacgttatgccatctggcttgggcacaggttttatcacgtaccagcgggcaggataaagtggtgttcggtaccgtgctgtttgggcgaatgcaggcagggcaaggaggtgacagcagcatggggctgtttatcaataccttgccgttgcgactggatatggatgataccccggtgcaggaaagtgtacgggcagctcattctcggttagctggattgctggagcatgaacatgcgtcactggcgctggctcaacgttgcagtggaataccgggggaagcgcctctctttagtgctttgctgaactaccggcatagtgcacaaccggttaccacggatgcaaccatcagcggtattgaatttctcggcgggcaagagcgcactaactatccgtttgtcttgtcggtggaggatgttggtcatgctttaggattgacggcgcaaattgctcaaccgattgatccggaacggatatgtgattatatgcagcaggcgctggagagtctggcagtggcgcttgaacagcatccagagataccggtacgaacattgaatattttgccaacagcagagaaaaagctgttgctggaaacctggaatgcaactgaaacgtcgtatccagatcacggttgtattcaccaactgtttgagcaatgggcagagaaaagtccagatgccacggcactggtgtatgaagaacagagtttcagctatgccgagctcaataaccgcgccaaccgtctggcgcatcaactgatcgcgttgggcgtcataccggaccaacgggtggcggtttgcgtgtcacgttcattggcaatggtggtaggggtattagccgtgttgaaagccgggggtgcctatgtaccgctggatccggtctataccggtgagcgcctgacacatatcctgaccgatgctgcccccgctattttgctggcggataatgtcgggcgtgatgtgctgggagaggacgcactggcagggttaacggtacttgacccaaatagcccgcctgatcaaccggacagtaacccacaagtgccggcattgacggcacagcatctggcgtatgtgatttacacctcgggctcgaccggcacgccgaaaggggtaatggtggaacatcgccatatcctgcgtttgtttgaggcgactgaattttggtatcactttaatcggcaagatatttggtgcctgttccactccattgcgtttgacttctcggtgtgggaattatggggggcgttacgttacggtgctaaattagtgctggttccgcacgcgattgcccgttccccccaggagctgcatcaattcgtgtgtcagcatggcatcacagtgttgaatcagacccccagtgcctttaaagcctttattgccagctatatcgccaatccgttaccggactgcttgcgctatatcatctttggtggggaagcactcgatccgagtattttgaagccgtggtatgccctgcgtgaggagacgttgccgcagttggtgaatatgtacggtatcacagagaccacggttcacgtcacttaccgggcactggctcgccatgatgtagaacagataacgagtcctattggcacacggatcccggacttaactctctatctgctggataagtatagtcagcctgtaccgttaggtgccgtgggtgagttatatattggcggggccggtgtggcacggggttatctcaatcgtcctgaactgacggcggagcgttttctaccagatccgttcagtagtgagccggatgcccggatgtaccgcaccggggatttggcccgctatttgccagatggcaatttggcgttcctgggccgaaatgaccaacaggtgaaaatccgcggtttccgcattgagccgggggaaatcgaagcccgattgacggaacacccggcagtgcatgaagcggttgtacaggtgatgggcggcggtcaggataaacggctggtggcttatgtagtggcagaagtggataaggagttgattaatcgtctgcgtactcacttaggtgcgattttaccggattatatggtgccggcagcatttgtctgtatggatgccttcccattgaccccgaacggtaaactggatcgtcgggcgctaccggtgccgggggaaaatgcctttgcccgtcaggtttatgcagcgccgcaaggggagacagaaactctgctagccactatttggagcgagttattgggtattgaacaggtgagtcggcatgacaacttctttgcattgggtggtcattcgctgttggcggtacggatgattgaacgtctgcgtaatgcgggattaacgctggcggtgcgtgatttattccaatccccggtgttatcggcatttgcccaaacagcaggacaatcactggaagtggtggtgccgacgaatgtcattaccccggtgaccacggcactcacacctgaaatgttgccgttggctgatctgacccaatctgagattgatcatatcattgcacaagtatcaggtggggttgccaatattcaggatatctatggcttatcaccgttgcaggacggtattctgttccaccatttactagcgaataaaggagatccgtatctgctggctggtcagatggtctttgctaaccgcgacttgttggacaactatttggcggcagtacaacaggtagttaatcgccacgatattttgcgtaccgcctttgtttggcaaggattatcagcgccagttcaggtggtttggcgtcaagctcaattatcagtcactgaactgacactagacccggttgatgggctggtctgtgaccagctagctcaacattttgatccgcgtcgctatcgtattgatctgcaacgagcaccactgttgcattttgcggtggcgcaggaggacgatggccgttggagcgcactgcaattgcagcatcatctgattggtgaccataccacaatggaagtgatgcagggcgagattcaggcttatcttgccggacaggaagagaacttgcctgtgccggtccctttccgcaatctggtggctcaggcccggttgggggtgagtcaggccgcacatacccgcttctttactgacatgttgtctgaagtggatgaaccgacgctgccgttcgggttgatggaggtacatcgagatggttcacaggtgatggaatcgcaccagatgttaacgcctgaactgaatgatcgtctgcgcagtcaggcacggcgtatgggtgtcagcttagcaactttatgccatctggcctgggcacaggtcttgtcgcgtaccagcggacaggtaaaagtggtattcggcaccgtgctgtttggacggatgcaagcaggacaaggggctgacaatggcatggggctatttaccaatactttgccgttgcgactggatatggatgataccccggtgcgggacggtgtacgattagcccatactcgattagccgaattgctggagcatgaacatgcctcactggcgctggcccaacgttgtagtgaggtgccgagggaaacacctctctttagcgcgttactgaactaccggcatagtgcacagccggttaccacggatgtaaccatcagcggtattgaattccttagcgggcaagagcgcactaactatccacttgtcttgtcggtggaagattttggtcacgcactggggctgacggtgcaaattgttcaaccgattgatccgaaacgcgtgtgtggttatatgcaacaggcgctggaaagtctggcagcggcgcttgaacagcagccggagacaccggtacggttgctgaatatcttgccggaagctgagaagaggttgttactggcaacttggaacgcgactcaagcaccatatcctgaccagagttgtattcaccggctgtttgagcaacaggcagaaaatacccctaatgcgatagcgttggtgtatggaaaacatattctcaactatgccgaattaaatgctcgcgctaaccaactagcccactggttaattgggcaaggggtcaagccggataaccgggtcgctgtgctattagaacgttctgttgagctggtggtggctcagttggctatccttaaggctggggctgtttatgtgccgattgatccccgagtgccggatgagcggaagtattggttgataagtgactgttcagccaagttattgcttaccgatactccgattgacttggcgatcccccggttttgcctggccgatgagatgggtgctattaggcaggaagataaccgcaatcctgacttaccccgttccagtactgaactggcctatatcatgtatacctcaggctcaacgggcacgcccaaaggagtgatggtaccgcatcgggcagtggttcggctggtgattaataatgggtacgccgaaattgggccggatgatcgggtggcgtttgaagctaacccggcttttgatgccagcacctttgaagtctggtcgccgttgcttaatggcggcgtgctggtggtgattgatcacgccacgttgctgatgcctaaagaacttgttcaagcattgcagactcatcgcattaccgtgctgtggctaagtgtcgggttatttaaccgactggcggcagagttgtctccggctttcccccagctcaaaatcctcattgtcggcggtgatgtgctggatccacatgtaattagacaagttctgcgtgataacccaccgcaacagttattgaatggctatggaccgagtgaaggcaccacctttactaccacttaccgtattacagcgttatcgccagaagtggtgagaattcccattggtcgaccaatagccaatacgcgggtttatctgttggatacttatggtcatccagtgccgcagggggcaatcggtgagatttatatcggcggagatggagttgtttgtggctatcttaatcgtcctgaactgacgaaggaacgttttttgccagatccgttcagtgatgaacccaatgctcgcctgtatcgcaccggggatttagctcgttacctaccagacggtaatctggaattcctgggccgcaatgatcaacaggtgaaaatccgcggtttccgcattgaaccgggggaaatcgaagcccaattgctgaaacacccggcagtaagcgaagcgttggtgctgactttgggtaacggtcaggataaacggttggtggcttatgtggtggcagaagcggatgagatgctggttaaccatctacgtactcacttaagtatgattttaccggattatatggtgccggcagcctttgtgcgtttggatacctttccgttgacgccaaacggcaaactagatcgccgagcattaccggtgccgggggaagaagattttgcccggcagatttacgccgcaccgctaggggagatggaaaccctattggcgactatctggtgtgaattactcggtgttgagcgaattagccgatatgacaactttttcgttttaggcggccattcgttgttagcagtgcgaatgatgaaccggatagcggcgttggggattgaatggccattgtccacgctgtttacattccctgttttgactacttttgctgaagcgataagtgcccagtttggggaatcggacaggatattacctgctatcgttccgctatcgcgtgaaggccaattgccgctgtcatttgcgcaacaacgtctgtggttcctgactcagtttgacggggtgagtgagacctatcatattccgctggccttacgtctacatggtcggttggatatcgccgcttggcaacagacacttgatacactgtttgcccgccatgaagcgttgcgctctgtcttcgttgctgtcgatggtcaaccgcagatagagttgttgccggcggcatcaggcttgctgatgagaaaatatgatctgcgtgacatgcctgatgtagatgcgcagcttgcgtctctctctgctcaggaaattgaaacactgtttgatcttgctcgcggcccattaattcgttccagtctgatacaactggctgatgatgatcacgttttcttgctgactctacatcatattgtttttgatggttggtctgtcagcgtgttgatgcgtgaattgagctccctttacaccgcgtttctggcgggacagccagatccgttgccaccgttgacgattcagtaccctgattacgccgcttggcagcgtcaatggttgtcggctgaacgcatacagtcccaatctgattattggcgcgcgaggctggttgatgcaccggttcttttggatttacctactgaccggccacgtccgcttcagcagtcgtttgccggggccttattgcctgtcagtctggatgcggagttaacccaatcccttaagcgcctgagtgagcaacagggcgtcacgttatttatgaccctgttggcggcttgggcgacagtgctgtcacgcctgtcaggtcaggaagatctggttatcggtacgccaagtgctggtcgtggtcggcaggaagtggaatctctgattggcttctttgtgaatacgttggcgttgcggatggatttatctgatgcaccgaatgtgacggaattgctggcacgtgtacgacaaaccgcactggcggcacaggaacatcaggatctcccgtttgaacaggtggtagaaatcatgcaactgccgcgccaactggcgcacaccccgctgtttcaggtgatgtttgcctggcagaacaatgagaatacggaatggcggctgccggggctagaggtttcaccagtcgagcaagtttttgatgtggctaagtttgatcttgagctgaatttgtttgaagttgaaggccagattgtcggttacctgaattatgctacggcgttatttgatcaagcgaccattgagcggcaggtgtgctatctccataccgtattgcgggggatggtagctaaccctcaacagccggtcgggaaaatcgatatcctgaccgtggcggagcgtaagctgttactggaaacttggaacgcaactgaaatgccgtatcctgctcactgttgtattcaccggctgtttgagcaacaggcagaaaaaagcccggatgccacggcgctgatgtatgcagggcaagttctcagttatgccgaattaaatgcccgtgctaatcggctggcgcatcaactgataatgttgggagtcgcaccagagcagcgggtggcaatttgcgtcgcgagctcaccggcgcggatcgtgggactgctggcagtactgaaagccgggggggcctatgtaccgctagacccggcttatccgggggaacgtctggttcatattttaaccgatgctgtgccagctattgtgctggcagataatacgggacgtaccgcattaggtgaaaaagtgctggcagcgttaactgtactggatccgaatagcctgcctgatcagccggatagcaacccgcaagtatcggcattaaccccacgccatctggcgtatgtgatttatacctccggttcgaccggcataccaaagggcgtgatggttgaacaccgtgggctggttaatctgattcaggaaaaaatcgttcagtttgagattcatccgggtagccggatgttgcagtttgcctcatttggctttgatgcgggtgtctgggaaaccatgatggcattgtgcagtggggccactttggcgatcccggctgatacggttcgtcaggagcctcgttatctctggcattatctggaagagcaggcgataactcacgcctgtctgaccccggccctgctccgggaggggactgatttaccggaaatgacgataagaccgacgctgatactcggtggtgaggcacccagcgcaacgttgcttcaagccctgagccgtcgggcaacggtgtttaatgcctatggcccgacggaaatcacggtgtgtgcgaccacctggcgttgtccgtcagactacactgagggtgtcattgcgattggacgtccgacagttaacacacaggtttatttgctgaatactgacggccagccggtgccgttaggggcagtcggagagctctatattggcggtatcggggtagcgcgaggctatctcaaccggcctgatttgacggcggaacgttttctggccgatccatttagcgatgagccggatgcccgtctgtaccggaccggggatttagcccgctacctgccggatggcaatctggaattcctgggtcgtaatgaccagcaggtgaaaatccgcggtttccgtattgaacctggggaaatcgaagctcgcttaatagaacacctggcggtaagcgacgcactggtgctgactttgggtgacggtcaggataaacggttggtggcttatgtggtggcagaagcggatgaccagttggttaacaacttgtacgctcatctaagagccattttgccggattacatggtgccggcggcctttatacgcctggataccttcccgttgacaccgaacggcaaactggatcgccgggcactgcccgcgccgggggtggaagcctttgcccgtcaggtttatgcagcgccgcaaggagaaatagaaacccggctggctgctgtctggcgcgagttgttgggcattgaacaggttagtcggcatgacagcttctttgctctgggggggcattcattgctggcggtgcggatggttgaacgtttgcgtaatgcggggttaacgttggcggtacgtgatttattccaatccccagtgttatctgaatttgcccaaacagtagggcaatcaccggtggtggcggtgccgacgaatgtcattacctcggcgactacgaaactgacacccgagatgttgccgttgattgatctcactcagactgagattgaccatatcattgaacaagtgccgggtgggattgccaatattcaggatatctatgccctgtcaccgttgcaggatggcatcctgttccaccatttgctggccagtgaaggcgacccgtatttgctggttggtcagatggtctttgctgaccgcgctctgttggatagctatttagtggcagtgcaacaggtgattaaccgtcatgacatcctgcgcacggcttttatctggcagggattatccacgccggttcaggtggtctggtgtcaggctttattgtcaattactgaactgacattgaacccgattgatgggccggtccgagaccagttagctcaacgttttgatccgcgtcgatatcgtattgatctgaaacgagcacctttgctgcattttgtagtggctcaggaggaggatggtcgctggagtgtattgcaattgttgcatcatttgattggcgaccatacgacgctagaagtgatgaacggtgaagttcaggcttatcttgccggacaggaagagaacttgtctgcgccagtccctttccgcaatctggtggcacaggctcggttgggggggagtcaggctgagcatacccgtttctttactgacatgttggctgaagtggatgaaccaacgctcccgttcgggttgacggaagtacatcggaacggctcacaaatggccgagttgcaccggatgttgacgcctgagctgaataaccgtttgcgtagtcaggcccggcgtctgggcgtcagtttggctgcgttgtgtcatttggcctgggcacaggtcttgtcgcgtaccagcggacaggcgaaagtggtgtttggcacagtactgtttgggcggatgcaggtaggggaaggagttgacagcggcatgggattatttatcaacaccttgccgttgcggttggatatagatgagacctcggtgcaggacagtgtacggttagcgcatactcggttagctgggttgcttgagcatgaacatgcttcgctggcgttggctcaacgttgcagtggagtgcaaaatgaagcaccgctctttagcgctttgttgaactaccggcataatgtaccggcgatagccacggatgcaatcattagcggcattgaattccttagcgggcaagagcgcactaactatccgttggtgctctcagtggaggattttggtgacgcactgggattgacggtgcaaattgttcaaccgattgatccggagcggatatgtggttatatgcaacaggcgctagaaagtctggctgcggcgcttgagcagcagccggaggcaccagtacgattgctgaatatcttgccggcatcggagaaaaaactgttgctggagagctggaacgcgacccaagcaccatatcctgaccaatgttgtattcaccggttgtttgaacaacaggcagaaaacacgcctgatgcgatagcactgatatatggagaacacattttcaactatgccgaattaaatgctcgcgctaaccggttagcgcgtcggttaatcaggcaggggattcaaccggatgagcggattgctgttttgttagagcgttctattgagctggtggtggctcaattggctatcctcaaagccggggctgtttatgtgccgatcgatcccagtgtgccggacgagaggaagcattggctgataagagactgttcagccaagttattgcttaccgatatcccgattgacctggcgattcctcggttttgtttggccgatgagatgggggctattaggggagaggattaccttaatcttgacttatctcggtccagtaccgagctggcttatattatgtatacttccggctcgaccggtatgcccaaaggggtgatggtgccgcatcgtgctgtagttcggctggtgattaataacggatatgccgaaattgggccggatgatcgggtggcgtttgaagctaacccggttttcgatgctagcacctttgaagtgtgggcaccgctgcttaatggcggtgcgctggtggtgattgatcacgccactgtgctaacacccaaagagtttgctcaagtattacggaattatcgcattaccgtgctgtggctgagtgtcgggttgtttaaccgactggcagcagagttgtccccggttttcccgcagctcaacatcttgattgttggtggcgatgtgctggatccgcatgtgatggcgcaagttctgcgtgatagcccgccgcaacagttattgaatggctatggacccagtgagggcaccacctttaccactacctaccgtattgcaacgttaccgtcaggagtgatccggatccccattggccgaccgatagctaatacgcgggtttatctgttggatgccaatggtcagccagtgccgttgggtgtggaaggagagatttatatcggcggggatggagttgcctgtggctatcttaatcgtcctgaactgaccgcagagcgttttttgccggatccgttcagtgataaacccgatgcccgcctgtaccgaactggggatttggcccgttacctgccggatggcaatctggagttcctgggccgtaatgaccaacaggtgaaaatccgtggtttccgcattgagccgggggaaatcgaagctcggctgatggaacacccggcggtgcatgaagcagtcgtgttggtgatgagtgatggtcaggataaacggttggtggcttatgtggtggcagaagcggatgagatgctggttaaccatctgcgtgatcacttaagtgcggtgttgccggattatatggtaccggccgcttttgtctgtttggatgccttcccgctgacgccgaacggcaagctggaccgtcgggcgctaccggcaccgggggaagaggattttgcccggcaaatttacgcagcaccgtcaggggagatggaaaccacattggcggctatctggcgtgaattactgagcgttgagcggattagccggtatgacaactttttcgcactgggcggccattctttgctggcggtgcggatgatgaaccgaatagcggcgctggggattgaattaccgctgtctacgctgtttacattcccgactttgatggcttttgctgaagtgatgagtgcccggtttgatgagtcaggcgaggcattgccagctatcattccgctatcccgtgaaggccaattgccgttgtcatttgcgcaacagcgtctgtggttcctggcgcagtttgagggggtgagtgaaacctatcatattccgctggctctgcgtttgcgtggtcggctggatatcgccgcctggcaacgggcacttgatacgctgtttgcccgccatgaagcgttgcgttctgtttttgttgctgttgacggtcagccgcaggtggaattgttgccgacggaatggggcttgccgatgagaaaatatgatctgcgtgacacgcctgatgtggatgcgcagcttgcttctttctcagttcaggaagctagtgtgtcgtttgatcttgcccgtggcccattaattcgttccactctggtacaactggctgacaatgatcacgtttttctgctgacccaacatcatattgtttccgatggctggtctttaggggtactgaagtcagagctggagacgctgtattcggcttacttgaaccaacagccagatccgttgctaccgttgacgattcagtaccctgattacgccgcttggcagtgtcaatggctgtcggcagcacagatacagtctcaatctgactactggtgcacaaagctggctgacgtaccagttctactggatttaccgactgaccggccacgtccgcctcagcagtcatttgccggaaatactttactcatcagtctggatgcggagttaacccaatctcttaaactcctgagtgagcaacagggcgtcacgttatttatgaccctgttggcggcttgggcgacggttctgtcgcgtctatcgggtcaggaagatctggttatcggtacgccaagtgctggtcgcagtcgacaggaagtggaatctttaatcggcttctttgtgaatacactagcgttgcgtatggatttatccggtgaacccagtgtggcggaattactggcacgtgtgcgacaaacggcgctggcagcgcaagaacaccaagatctgccgtttgagcaggtggtggaaatcgtgcaaccgtcccgccgactggcgcataccccattgttccaagtgatgtttgcctggcagaacaatgagaacacggaatggcggttgccgggattggtggtttcacctgttgagcaagcttttgatgtggttaagttcgatcttgagctgaatttgtttgaggtggagggcaggattactggctatctgaattatgccaccgctctatttgatcaagtgaccattgagcggcaggtaggctatctccataccatgctgcgggagatggtagctaatcctcaacagacggttgggaaaatcgatattctgaccgtagcggagcgcaagctgttattggaaacccggaatgtcattgaaacccggtatcctaagcagttatgtattcatcagttatttgaacaacaggtggagaacgagcctaatgagacggcagtggtatatgaagaacacaccctcagttacggcgagctcaatgcccgtgccaaccggttggcgcatcaactgatcgcgttgggcgtcataccggaccaacgggtggcggtttgcgtgtcacgttcaccggcaatggtggtgggggtattagccgtgctgaaagccggaggtgcctatgtgccgctggatccggtctatactggggagcgcctgacacatatcctgaccgatgctgcccccgctattttgctggcggataatgtcgggcgtgatgtgctgggagaggacgcactggcagggttaacggtacttgacccaaatagcctgcctgatcaaccggacagtaacccgcaagtgccgggattgacggcacagcatctggcgtatgtgatttacacctcgggctcgaccggtacgccgaaaggggtgatggtggaacatcgtcatatcctgcgtttgtttgacgccactgaatcctggtatcgatttaaccggcaagatatttggtgtctgttccattccattgcgtttgacttctcggtatgggaattatggggggcgttacgctacggcgctaaactggtgctggttccgcatgcgattgcccgttcaccccaggagctgcatcaattcgtgtgtcagcacggtgttacggtgttgaatcagacccccagtgcctttaaagcctttattgccagttatgttgccaatccgttaccggactgcttgcgctatatcatctttggtggggaagcacttgaaccgagtatgctgaagccgtggtatgccctgcgtgaagagacatcgcctcagttggtgaatatgtacggtatcacagagaccacggtacacgtcacttactgggcactggctcgccatgatgtagagcagacaacgagtcctattggcacacggctcccggatttaaccctctatttgttggataagtatggtcagccagtaccgtcaggcgctgtaggtgagttatatattggcggggccggtgtggcacggggttatctcaatcgtcctgaactgacggcggaacgtttcctgacagacccgtttagtcatattccagatgcccggatgtaccgcaccggggatttggcccgctacctgcctgacggcaatctggagttcctgggccgtaatgaccaacaggtgaaaatccgcggcttccgcattgagccgggggaaatcgaagcccgattgatggaatacccggcggtgagagaagcggttgtgctggcgctggatgatggtcaggataaacggctggtggcttatgtagtggcagaagtggatgaggagttgattaatcgtctgcgtactcacttaggtgcgattttaccggattatatggtgccggccgcttttgtgcgtctggagacctttccgttgaccccgaacggcaaactggatcgccgggcgctaccggcaccgggggaagatgcctttgcccgtcaggtttatgcagcgccgcaaggggagacagaaactctgttagccactgtttggagcgagttgttgggtattgaacagatcagccgacacgacagcttctttgcattaggcggtcattcattgctggcggtgcgaatgattgaacgtctgcgtaacgtggggttaacgttagcggtgcgtgatttattccaatccccggtgttatcggcatttgcccaaacagtagggcaatcaccggcggtggtagtgccggcaaatgttatcaccccagtaaccacaatactcacccccgatatgttgccattaattgatctcactcaaccggaaattgaccatatcgttgaacaagtgccgggtggaatggctaatattcaagatatttatgccctgtcgccgttacaggacggtatcttgttccatcatctactggcgaataaaggtgatccgtacctattagtcagtcagacggctttcgttgatcgatctctgttggacagttatttggcagtagtacaacaggtgattaaccgccatgacatcctacgcactgcttttatctggcaaggattatcaacaccggttcaggtggtctggcgtcaggcaccgttatcagtgactgaattgacattggatcccattgatggaccggtttatgaacaactcattcaacgttttgacccgcgttatcatcgtctcgacttgagccaagcccccttgctgcgttttatggtggcgcaagaaacggatggtcgctggattgcactgcaattacagcatcatctgattggcgatcatacgacactggaagtgatgaaccgagaagttcaggcgtaccttaccgggcgggaagagaacttgtctgcgccggtccctttccgcaatctggtggctcaggtccggttgggcgtgagccaggccgaacatacccgtttctttactgacatgttggctgaagtggatgaaccgacgctgccgttcgggttgacggaagtacatcgagacggctcgcaggtgacagaattgcaccggatgttgcccaccatattgaataatcgcttgcgtagtcaggcccggcgtctgggcgttagtttggcggcgttgtgtcatctggcctgggcacaggtattgtcgcgtatcagtggacaagagaaagtggtgttcggcactgtgctgtttgggcggatgcagggtggagaaggcgctgatagcggcatgggactgtttgtcaacaccttgccgttacgactggatataaataataccccggtacaggatagtgcacgcttaacccatactcggttagctgaattgcttgcgcatgaacatgcttcactggcactggctcaacgttgcagtgaagtgtcgggggaaacgcccctctttagtactttgctgaactaccggcatagtgcgcagccgatcaccgtagatgaaactatcagcggtatagaatcctttaacgggcaggaacgtaccaactatccgtttactctatcggtggaggattttggtcacgctttgggattgaccgcgcaagtggtacaaccgtttgatccgaaacggatatgtggttatatgcaacaggcgctggagagtttggtggaagcacttgaacaggcaccggaaacaccggtacgggcattgaatattctgccagaagtggaacgccgattgttgctaaaaacttggaatgcgactgaaactgtctaccctaagcagttatgtgtccatcagttatttgaacaacaagtggagaaaaacccggatgctacggcgctggtgtatgaagaacagacgttcagctatgcggaactgaatacccgcgctaaccgactggcccatcaactgattgcgttgggtattgcgccagaccagcgagtagcgatttgcgtgacacgttcaccgacgatggtcgtaggcttgctggcggtattgaaagcgggtggtgcctatgttccattggacccggcttatccgggggaacgtttggcacatattttgaccgatgcagcaccggctattttgctggcggacaatgtcggatgtgccgcattgggtgaggaagcactgtcaggactcacggtactggatccgaatacgctgcctgataagccggacagtaacccgcaagtgaccgcactgactgcacagcatctggcgtatgtgatttacacatcaggttcaaccggtacaccaaaaggtgtgatggttgagcatcgtgggctaatcaatcttgtctgggataaaattgcccagtttgacgttcactcggatagccggatattgcagtttgcctcattgagttttgatgccagtgtttgggaaatcatggtggcgttgggaagtggggccagtctgattatcgcagtcgatatcgtccggcaggacccgcttcgtctctggcattatctggagcaacaggcagtgacccatgcctgtctgaccccagcctttctccgggaaaggaccgatttaccggaaatgacgataagacctacggtgatactcggtggtgaagcacctagcgtaatgctgcttcaggcactgagtcgtcgggcaacggtgtttaatgcctatggcccgacagaaatcacggtgtgtgcgacgacctggcgttgtccaccagactacacggatatgttagtgcctatcggccatccaacggccaacacccagatttatctgttggatagctacggccagccagtgccgctgggagtagtgggtgagttgtatgttggtggtgtgggggtggcgcgtggctaccttaatcgtcctgagctgaccgcagaacgttttctgtcggatccgttcagtgatgaacccaatgcccgcctgtaccggaccggggatttggctcgttacctgccagacggcaatctggagttcctgggccgtaatgaccaacaggtgaaaatccgcggtttccgtattgagccgggggaaatcgaagcccgattgatggaacacccagcggtgcaagaggctgttgtgttggtgctgggtgatgagcagaacaaacggttggtagcttatatagtggcagaagcggatgaggcgctggttaaccgtctgcgtacacacttgagcgcaatcttaccggattatatggtgccggcggcttttgtacgcctgaatgccttcccgctgaccccgaacggcaaactagatcgtcgggcattaccggtaccgggggaagaggcttttgtccggcagatttacgccgcaccgtcaggagagatggaaaccacattagccgctatctggcgtgaattactgggcgttgagcggattagccggtacgacaactttttcgcactgggcggccattcgttattggcggtgaggatgatgaaccggatagcggcgttggagattgaattaccactgtctacgctgtttacattccctgctttggccgattttgctgaagcgataaatactcgattgaatgagcagagcagcaaactaccggtcattataccactatctggtgagggtaaattgccgttgtcatttgcgcaacagcgtctgtggttcctgtcccagtttgatggagtgagtgaaacctatcatattccggtggccctgcatttgcgtggtcggttggatatcgctgcttggcagcaggcgcttgatgcactgttttcccgccacaaagcgttgcgttctgtcttcgttgccgttgacggtcagccgcaggtggagttattgccggcagcatcaggtttgccgatgaaaaaatatgatctgcgtaacgcacctgatgcggatgcgcagcttgcctctctctctgctcaggaaaccgaagtaccatttaaccttacccgtggcccattaatccgctccagtctggtacaactggctaatgatgaacatgtattcctactgactctgcatcatattattttcgatggttggtctgtcagcgtgttgatgcgtgaattaaacaccctttacaccgcatttctggcggggcagccagatccgttgccaccgttgacgattcagtatcctgattacgccgcttggcagcgacaatggctgtcggctgaacggatacagtcccaatctgattattggcgcacgaagctggctgacgcaccgattctcttggatttgcctactgatcggccacgccctcctcagcagtcatttgccgggaatatcttactcgtcagtttggatgcggagttaacccaatctctcaagcgcctgagtgaacagcagggtgtcacgttatttatgaccctgttggccgcttgggcgacggttttgtcgcgcctgtcaggtcaggatgatgtggttatcggtaccccaagtgcgggccgcagtcggcaagaagtggaatccctgatcggcttctttgtgaatacgctggcattgcggatggatttatccggtgcaccgaatgtgacggaattgctggcgcgtgtacgacaaaccgcactggcggcacaggaacatcaggatctcccgtttgaacaggtggtggaaatcgtgcagccgtcgcgccaactggtgcataccccattgttccaggtgatgtttgcttggcagagcaatgaaaatagggactggatgttacccggactgaccatttcacctgttgggcgatcttttgatatcgctaagtttgatcttgagctgaatttgtctgagatggatggacggattgtcggttatctgaattatgccaccaccctgtttgatcaatcgaccgttgagcggcaggtgggctatctccataccgtattgcgagagatgacggctaaccctcaacagccagttgggaaaatcgatatcctgaccgtggaggagcgtaagctattactggaaagctggaatgcaacccaaacgcgatatcctgaccagacatgtattcaccggctgtttgagcagcagacggagaaaacccctgacgcagtagcgctggtgtatgaagagcgcattctcagctatgctgaattaaatgcccgcgccaatcggctggcctatcggttaattgagcgcggggtacagtcggatgatcggatcgcggtgttgttagaacgatctattgagctggttgtagctcagttggctattctcaaggcaggagccgtttatgtgccgatcgatccccggatgccggacgagcggaaaaactggctgataagcgactgttcagccaaattattgctctccgatatcttggttaacctagcggtccttcagttctgccttgatgatgagatggacgctatcaggcaggaagatcactgtaatcttgacttaccccgctccagtaccgaattggcctatattatgtatacctctggctcgaccggcacacccaaaggggtaatggtgccacatcgtgcggtggttcggctggcgattaataatgggtacgctgaaatcggggcagatgatcgggtcgcgtttgaagctaacccggtttttgatgccagtacctttgaagtttgggcaccgttgcttaatggcggtgcgctagtggtgattgatcacgccacattgctgacgccgaaagagtttgttcaggcattacagacttatcgcattaccgtactgtggctgagtgttgggctgtttaaccgactggcgacagcgttgtccccggtgttgccacaaatcaaaaccctgattgttggcggtgatattcttgatccacatgtcattgcccaggttctgcgtgatggcccgcctcaacaattattgaatggttatggaccgagtgagggtaccaccttcactaccacctaccgcattacggcattatcaccggaagtgagccggatccccattggtcgaccgatagccaatacgcgggtttatctgttagatacctatggtcagccagtgccacagggggtaactggtgagatttatatcggtggagatggggttgcctgtggctatctcaatcgccctgaactgaccgcggaacgttttctgctagatccgtttagtgataagccggatgcccgcttgtaccgcaccggggatttggcccgttacctgccagacggtaatctggaattcctaggccgtaatgaccagcaagtgaaaatccgtggtttccgtattgagccgggggaaatcgaagtccggctgatggaacatccggcggtgagtgaagctgttgtgttggcacagggtgacagccaggacaaacggttggtagcttatgtagcagcagaagcgaatgaagagttggttaaccatctgcgtactcatctaagcgctattttgccggattatatggtaccggcagcgtttgtacgcctggataccttccccttgacaccaaacggcaagctggaccgtcgggcgttaccggcaccgggggaagaagcttttgctcggcaggtttatgcagcgccgcaaggggtgacagaaaccacactggctgctatctggagcgagttgttaggcgttgagcaggtcagtcggcatgatagcttctttgcgttgggggggcattcattgttggcggtgcggatgattgagcgcctgcgtaacgcggggctaatactggcggtacgtgatctgttccaatccccggtgttatccgcatttgcgcaaacagtagggctgtctcgggcagtggtagtaccggcgaatgtcatcaccccggcgaccacggtacttacacctgagatgttgccgctgattgagttggcccagcctgagattgaccatattgtggaacaagtgccgggagggatggccaatattcaggatatctatgccttgtctccgttgcaggacggtattctgttccaccatttactggcgaacaaaggcgatccgtatctgttggcttatcctatagcctttgctgatcgttcattgctggatcgttatctggcggcagtgcaacaggtgattaatcgccatgacatcctgcgtactgcctttgtttggcaaggattatcagttccggctcaggtagtctggcgtcaagcgtcgttatcagtgactgaattgacgttggatcccgcagatgggccagtttatgaacaattgtctcaacgttttgacccgcgtcagcatcgtcttgatttaggacaggcaccactattacgttttgttattgcacaagagacggatggtcgttggatcgtattgcaattgcagcatcatttgattggcgaccataccgcaatggatgtgatgaaccgtgaagttcaggcgtaccttgccgggcagggggacagcttgcctgttccgattcctttccgcaatctggtggctcaggctcggctggggatgagtcaggccgagcatacccgcttcttcaccgatatgttggcagaggtggatcaaccgacgttaccattcgggttgacggaggtacatcgggatggttcacaggtggcccaatcacaccggatgttgcctgccatgttgaatgaccgtttacgtcatcaggctcggcgtctgggcgttagtttggctgcgttgtgtcatttggcttgggcacaggtgctgtcacgtaccagcggacaggagaaagtggtgtttggtaccgtgctgtttgggcggatgcaggcaggggaaggtggtgacagcggcatgggattgtttattaatacattgccattaaggctggatatggatgataccccggtgcaggagagtgtacaggctgcacatactcggctggctggattattggaacatgagcacgcttcactggcattggctcaacgttgcagcggggtacaaaatggaattccactctttagtgctttgttgaactaccggcataatgcgcccgtgattgtcacggatgaagttaccaatggcattgaatttcagggtgagcaagagcgcactaattacccgtttgttttgtcggtggaggattttagtaatgcacttgggctgacgacgcaaatcgttcaaccgattgatccggagcggatatgtgattatatgcaacaggcactggaaagcttggcagaggcgcttgaacagaagtcggagacaccgatacggttgctgaatatcttgccggaagctgagaagaagctgttgctggagagctggaatgcaacccaagcgttgtatcctgaccaatgttgcatgcaccggctgtttgaacaacaggcagaaaaaacccctgatgcgatagcgctgatgtatggagaatacattctcaactatgcggaattaaatgctcgtgctaaccggctggctcgccggctaatcgggcttgggattaggtcggatgatcgcgtggctgtactgttagaacgttctgttgaactggtgatagctcagttggctatcctcaaggccggggctgtttatgtgccactcgatctccgtataccggacgaacggctgcattggctgataagcgattgttcagccaaattgttgcttacggatattccagttgacctggatattcccctgtattgctttgccgatgaggtagacgatattgaggaagaaggttacctcaatcttgatttacctcgttccagtaccgatctggcttatatcatgtatacctctggctcgactggcacaccaaaaggggtaatggtgccgcatcgggccgtggtccgactggtgattaataatgggtatgctgaaatcgggccggatgatcgggtggcttttgaggctaatccggctttcgatgctagtacctttgaagtttgggctccattgcttaatggtggaacactagtggtaattgatcacactactgtattgacgccgcaggagtttgtccaaacattacaggcttatcgagtcactgttatgtggttgagtgtcgggttgtttaaccgattagcggcagagttgtccacggttcttccgcagctcaaaatcctgattgtcggcggcgatgtgctggatccgcatgcgatagcgcaggttctgcgtgatggcccgcctcaacagttattgaatggttacgggccaagtgagggcactacctttaccaccacctaccgcatcacggcattatcaccgggaatgacccagatccctattggtcgaccaatagctaatacgcgggtttatctgctggatatctatggccagccagtgccgcagggggtaaccggtgagatttatatcggtggggatggggttgcctgtggctatctcaatcgtcctgagttaacggctgaacgcttccttgttgatccatttagtgatttacctgatgcccgcatgtaccgaacaggagatttagcccgttacctgccagacggtaatttggagttcttgggccgtaacgatcagcaaattaaaatccgaggtttccgtattgagccgggtgaaattgaggcacggttggtggaatatccaactgtacaagaggccattgtgttggtgctaggtgatggacaggacaaacgtttggtcgcttatgtggtggcacaggaggatgaaggactggctaatagcttgcatacttacctgagtgccattttaccggattacatggtgccgtcggtttttgtgcgtgtggatgattttccgttgactcccaacggtaaattggatcgtcatgcgttaccagctccaggcaatgaagcgtttgcccggcaggtctatgaagcgccacaaggagaaatggaaaccgtattggtggctatttggtgtgaattactggcgattgagcaggtaagccggtatgacaatttcttcgccttgggtggtcactcactgttggctatgcggatgataaatcttgcagctaatcatggacttatttgtacattgaatgatctgtttcaattccctgttctgtctgaactggccgcgaaaatgacatcagataagctgtctcaaccgagaaatagcgcaatatcggtgcgatctgatggaacaggtttaccgttattctttgtgcccagtgggatgggtgattattcctatgtgttcgggttgtctcaacagcttcatctaggctacccgatttatgcactgccttggccgtccatcagtgaagaaccaatgtcgacaatggaagagcaagcgacaagaatgatcaactttatgaaagcggttcaaccggaaggtccatatcggatatgtggttattcttccggtggcatattggcttacgcgattgcccaacaacttctgtattccagtgaggtggttaatttcctcggtctgatagatacgcctgctcctcattattacaggcaacggataacgccaccaaaacttcaattttttattgaattggcgaggcaggcagaggacggatatattgaagaaatggcggcactgtaccggcgaattgatgagttaaatttggtgcagtttatcgaaacggcgcagaaattggcattatacccggcgaatctgcgtgccgatttaatcgcaaaacgttgggagcagatagcaaattatgcacaaatagttagagactatgagccgcaagtatcagcgataacgctgcatcaattctatgcaatggaatcttctccatctgttcctgttgttatagatactaaaattatggatattgaaccacagcctttaaacatgggttcgtcgttaggttgggcgcaggtattacccgattcttcgcttcggttaattccgatttcgggtaaccattttagtctgttggagaataatgaggataaagttgctttagttcaggctttaaatatggcgttggcagtgggttggaacgaagaggttcagtaatggcttaaagagactaaaacgatcctgtatccgtataataatccggcatatataaattatgccgggttttctatatgtgttttgaagagaattgttatctgtttttcctcaaccctattatttcattagatggattcgactaataaatgcaaatgattttacccatactaaacatcgccgtgacctgactggttgttggtggtatattttcgcggtgtttcggtattgaaggtagtcactttttacattgtgtaccaattttagtaccaaactttaatggattgacgagataataatttaaatcgttattttagttgaatatcaaactccttcaagtgacctttcgtgtgggtcaccactgtagataaggattttaaatgcctgttgttactcttcctgacggtagccaacgccagtttgaccatgccgtttctgtaatggatgttgcctgtgatattggtcctggtttagcgaaagcatgcattgctggccgcgtaaatggtgagctagtggatgcttgtgaattaatcgattcagatgcaaatcttgccatcatcacaagtaaagatgatgcagggctggaaattatccgccattcatgcgctcatctgctgggccatgcgattaaacaattatggccagatacgaaaatggctattggtccgattattgataatggtttttactatgatgttgatcttggccgtgccctgacgcaggaagatattgaactgcttgaaaagcgcatgttggaacttgccaaaaaagactatgacgtcatcaagaaaaaagtgaactggcaagaagctcgtgataccttcgttgctcgtggtgaggattataaagtacaaattttggatgaaaacatcagtcgagatgatcgtcctggtctctataatcatgaagaatatattgacatgtgccgtggcccacatgtgccaaatatgcgtttctgccatcattttaaattgcagaaagttgcaggggcatattggcgtggggatagcaacaataaaatgttgcaacgaatatacggtaccgcgtgggctgataagaaacagctcaatacttatctgcaacgtttggaagaagcggctaaacgtgaccatcgtaagattggtaaacaattagatctataccacatgcaggaagaagctccaggtatggcattctggcataatgatggttggactattttccgtgagctggaaacttttgtccggaccaaactgaaagaataccaatatcaggaagttaaaggtccgtttatgatggaccgtgttatgtgggaaagaacgggtcactgggaaaactacggtgagcatatgtttaccacttcttcagagaaccgtgaatattgcgttaaaccgatgaactgcccggggcatattcagatttttaaccaagggttaaaatcctatcgtgatttgccgttacgtatggctgaatttggtagttgtcaccgtaatgaaccatcaggggcattacatggcttgatgcgggttcggggttttactcaggatgatgctcatatcttctgtacagaagagcaaattcaccgggaagtcagtagttgcattaagatggtgtatgacgtttacagcacttttggttttgaaaaaatcgtggttaagctgtcaacccgcccggaaaagcgcattggtactgaggaacaatggaatcaagcggaagaatctctggcggcagcactacaagaaaatggtgttcaatttgaatatcagccaggtgaaggtgccttctacggaccgaaaattgaatttactttgcatgattgtttggatcgtgcgtggcaatgtggtactgtgcagctcgacttttcactaccaggtcgtttgagtgcgtcctacgtaggtgaaaataatgaacgtaaagttcctgtaatgattcaccgagcggttctgggttcactggaacggtttatcggcatcctaactgaggagtatgcgggtttcttcccaacatggattgccccacagcaggtagtggtgatgaatatcaccgatagccaagctgattatgtacaggaattagtaaaaaaacttcaagatgctggcattcgtgcaaaagcagacttgagaaacgagaagattggctttaaaatccgtgaacacactctacgtcgtgtgccctacatgcttgtctgtggtgaaaaagaggtcgaatcagggaaagtttctgttcgtacccgccgtggtaaagatttgggcagcattgatgttaacgggttcatcgaaaaactgctgatagaaatacgcagtcgcaatcttcatcaattggaggaataaggtattaaaggcggaaaaagaattcaaccagcgcgtcctaatcgtattaatgaagagattcgcgctactgaagttcgtttaacaggttcagatggcgaacagattggcattgtcagtctgggaaaagcgcttgaaaaagctaaggaagagggtgttgatttagttgaaatcagcccgaatgctgagccgccggtttgccgtcttatggattacggcaagttcctgtatgagaagagtaagtcaaccaaagaacagaagaaaaaacaaaaggttactaaggttaaggaagttaaattccgtcctggtacagaggaaggcgactatcaggtaaaaataggcaacctgaagcgttttctggagaatagcgataaagccaaagttaccctgcgtttccgtgggcgtgaaatggcgcaccaacagattggtatcgaaatgcttgacaaagttcgcaacgatctggatggactggcggtagtcgaatccttcccttcgaagattgaaggccgtcagatggtaatggtgctcgctcctaagaagaaatagttaggcaatcaagtaataagctcctgtcggttcatctgattggggcttgttcgcctgactaattcgttataatttacaatgcaaagtggaaattaaaatgccaaagattaagacagtacgcggcgccgctaaacgctttaaaaaaaccgcaagtggtggttttaagcgtaagcgtgctaaccttcgtcacattctgactaagaaatcaaccaagcgtaaacgtcatttacgtccaaagggcatggtctccaaaggtgatctgggcctggttgttgcttgcttgccgtacgcataagcaatttttagattagaattcagagacgataggagaagtatatggctcgcgtaaaacgtggtgttgtcgcccgtgcacgtcacaagaaaattttaaagcaagcgaaaggttactacggtgcccgttcgcgcgtttaccgtgttgccttccaggcagtaattaaagcagggcagtacgcttaccgtgaccgtcgtcagcgtaaacgtcagttccgtcaactgtggattgcacgtatcaacgctgctgcacgtcagaatggtttgtcttacagccgtttcatcgatggtctgaaaaaagcctctattgaaatcgaccgtaagatcctggctgacatcgctgtgtttgacaaagtggcatttgctgctttagttgaaaaagcgaagagcgctctggcataagttagggtagtaagaggggggcatgctccctcttttactttgttgtcagatgtagcttacgagagagagtcgttgtcaaaaaagagttttactctgagagaactaacattatgtctttagctttttttcgcatctttttttactttagcacctgaattcagggggctttgcgcgtaagaaaagaaacgaaaagtagcgcctgagcctccgttgtggaggcttttttgtttttatgacagtaaggccgttaggccgaaggaagaggaaaacgatgccacatctcgctgaactggttgcaaacgcaagagcagccatagaagatgcccaggatgttgctgcgttggatttggtgcgtgttgaatatttaggcaaaaaaggccatttaactctccaaatgtcatcgctgcgtgatctgccggtcgaagaacgtccagcagcaggggcggttattaatcaggttaagcaagaagtccaggaagctctgaatatccgtaaagaaaaactggagactgaccttttgaacttccgtttagcagcggaaaaaattgatgtatcattgccgggtcgccgtatggaaaatggtggactacatccggttaaccgcacaatagagcgtattgagactttctttggtgaattagggttttctatagaatcaggccctgagattgaagatgattatcataatttcgatgcgttgaatattcctgctcaccatcctgcacgtgctgatcatgatactttctggtttgatgccaaacgtctgttgcgtactcagacttcaggtgttcaggttagaactatgcacagtcaacagccgccaattcgcgtcattgcaccgggtcgcgtgtatcgtaatgactacgatcagacacacacgcccatgttccatcaggtagaaggtttgattattgatcgtgatatcagttttaccagcctgaaaggaacgttgcacgatttcctgactaacttttttgaagaagatttgcaggttcgtttccgaccttcttactttccatttacagaaccttcggcggaagttgatgtaatgggtaaaaacggtaaatggctggaagtgttgggttgcggtatggttcatcctaatgtattgcataatgttggtcttgatcctgaaatttattctggttttgctttcggcatgggagtggaacgcctgacaatgttacgttacggtgtaactgatttgcgtgcgttcttcgaaaatgatctgcgttttctcaaacagtttaaataagggcgggaatatctcatgaaattcagtgaactctggttacgcgaatgggtaaatccagccattagcagtgaaacattatctgatcaaattaccatgataggtctggaagttgatggcgttgaagccgttgccggtcaatttcatggtgtggttgtcggtgaagttgttcaatgtgctcagcatccaaatgcagataagctacgggtaacaaaagtgaatgtaggcggtgaacgactgctggacatcgtttgtggtgcaccaaattgccgcttggggttgaaagttgctgtagcaaccgtgggtgctgtattaccgggtgatttcaaaatcaaggcggcaaaactgcgaggtgagccttctgaagggatgctatgttctttttctgaactgggtatttctgaggatcacgacggtattattgaattgccaattgatgctcctttaggtgttgatctgcgtgaatatctgaagctggatgataaggtcattgaaattagtattacgcctaatcgcgctgactgcctaagtattataggggttgcgcgtgatgtggcggtcgctaataaaatgccactatctgagccacaaattgaggcagtaaaaccgacaacagatgctattttccctattcgtgttgaagcaacagaagcttgtccacgttaccttggacgggtaattaaaaacattaatgtgaaagcggcaacaccccaatggatgcgtgaaaaattacgtcgtggtggtatccgttccatcgacccgattgtcgatgtgactaactatgtattgcttgaattaggccaaccattgcatgcgtttgatttggagcgtttgaatggctcaatcactgtgcgcatggcgaagcaggatgaaaaattggtgctgctggatggtacagaagccaatctttctactgataccctagttatttctgatgaaaaacaagctgttgcaatggctggtatttttggcggtgaacattcaggtgtgaatgaagaaacgcaaaatattttacttgagtgcgcattttttgctcctttagcgattgctggccgtgctcgtcgttatggtttacacactgatgcttctcatcgttatgaacgtggagttgatcctcagttacaacacaaagcaatagagagaacaactcaattattgattgatatttgtggtggtgaagctggcccgattattgatgttactgatgaatctcaattgcctcaatctgcgacaatcacattgcgtcgtgaaaaactggatcgtttgattggtcactatatacctgatgaacaggttggtgacatcctgacccacttaggttgcaaagtcactattcaggaaaattgttggcaagcggttgcaccaagctggcgttttgatgtggagattgaagaagatttggtggaagaggttgcccgtatctacggttacaacaatattccagatgtaccgattcgcgcagatcttatcatgaaaaaacatcgtgaaacggatctttccctgcaacgtgttaaaacggtgctcgttgatagaggttatcaagaagcgattacttatagctttgttgatcccaaaattcaggcgctgttacatccacagcaacaagcgttgatgctgcctaacccaatttcagcggatatgtcagcaatgcgtttatctctgctgactggtttgttaacaacggtggtatataaccagaaccgccagcaaaaccgtgtgcgcttgtttgaaactggcttgcgttttgttcctgatgaaaatgccgatcaggggattcgtcaggagctgatgctagggggggttattacgggaaatcgctttgaagagcattggtcactggaaaaacagtccgttgatttcttcgatatgaaaggcgatttggaagccgttctagagttaactggaaaattatctaagatttcttttagagcagatgtaaatccggcgttgcacccaggtcaaagcgccgggatttatttggaaaatgaatacatcggatatattggtgtggttcacccagaattggaacgcaaacttgatttaaatggccgcaccgtggtattcgaagtactctggaacaagctggcaagccgcgtggttcctgatgcgaaagagatttcacgtttcccgtcaaaccgtcgtgatattgcgatcgtggtgcctgaaaatgttgctgtagaagatgttttggctgaatgcaagaaagttggcgtaaatcatatagttggcataaacttgtttgacgtgtattgtggtaaaggtgtagcagagggtcataagagccttgctataagttttatcttgcaggataccgcgcgtacactggaagaagaagagattgctgcgacgattaataaatgtgttgcagtgctgaaacagcgattccaagcatccttgagggactgaacttatggcgcttactaaagctgaaatgtcagaaaatctgtttgagaaactgggaattagcaagcgtgatgctaaagatctggttgaattattctttgaagaagtgcgtcgttctttggagaatggtgagcaggtaaaattgtctggatttggcaactttgatttacgggataaaaaccaacgtccgggacgtaaccctaagactggtgaggacattccgattacagctcgccgagtagtgacattccgtcctggtcagaagttaaaaagcagggttgagaaagccacacctaaagaataatcaaaaaggccgcatcaatagcggcctttttcttaaatgatcctccctcatgagcttgatttaccatgcaatccactcattccatcgctgaattagtgactcgtcagaaaagacatgattatcgttttctggcaattctcacgtgtttatttttactcgttttttttctctcgctttgtgctggggaaaattggatctggcctaataaatggttttctgaaacaggtcaattgtttgtgtggcagttacgttttcctcgtgtattagctgtcgttgctgtaggtgcgagcctgactgtggcgggtgcagtaatgcaggcactgtttgaaaatccgttggcggaacctgggctattgggggtcagtaatggtgctggcgtggtggtggtgtttttggtgttgatgtttcatggcattgcgccgttctggttattaagtattggcgctgtgctcggtgcgctgaccgtcacaatgatattgctgaccttttcaagaaatcgttatctgaataacgcccgtttgttattggtgggggttgcttttggtgttgcctctggtgctttaatgacctggatggtttattttagtactagcttggacttgcgtcagctaatgtattggatgatggggagttttagtggaatagactggcggcatcaatggttggtagtcgctttgtttcctttgattatttggttgagcagacaaggaaaagtacttaattttctttcactgggagaaacacaggcccaacagctaggtatctcactttattattggcgtaatttatttgtctttgctgttgggttgttggtagggttaagtgttgcacttgctggaacaattagctttattggtttggttattccacatattttgcgtttatgcggcctaacagattataaaactctactgcctgcctgtgttctatccggcggttatggattattgctggctgatctgctatctcgtcttagcttgaataatgcagaagtaccgattggtgttgtaactgcaacattgggtgcgccagtcttcatttggttattattgagggttagagactggagttaaaaagtgaataatgtgcaagtgactaatcagttgatggctctcaatcaggtatcagtacgaaaccgattaatgccgctgacagcgttggtacaacaaggtgaacagatacatatcattgggccgaatggttcaggaaaaagtacactattagcctgtatggccggtattttaccctatagtggtgcaatcgatttgcaacaaaagtgccttagtcaatatagtcactgccaattagcacgctacagagcatggcttagccagcaaatttcttctgtgccaataatgccggtttttcaatatttgcaactgcatttagcagctcatcttgttaattgtgacggtgtgttgtcagaactctgttccttttttaagttgggaaagtttctagagacacctgtaggcaatctatctggtggtgaatggcaaagggtgcgattaaccggagtttttttacaagtctggccatcaatcaatttggaaggcaaattattgctcttggatgagcctacgaataatcttgatatcactcaggtcgcggcacttgatctgttgataaagaaattctgtgaacttggtggaaccgtagtcatgagtggtcatgatctcaatcatagctatgataaagctgatcggatctggttgcttgctgatggatcactggttgcgaatggaaagccggatgaggtaatgaaagaaaatacgctctccagagtttttgccgctgatatcaaatgcgtgccagaaaagacagataaatattggcgggttttcttaccataattacagtccaggcttatgtatgtgcctgccgtgaatctgtacgtatcgtggatcgatagtaatttccacttaatttgctaaatcatacctgtgtttacgattcgttcaaatatagtcatctaatatatcgttatattatgaatgaattggactgtgttttatggatagctttcttccattttctcgtcctgcaatcggtgatgaagaaattcaggcagtagagaaggttcttcgttcggggtggattacaacaggcccgcaaaatcatcaattggaacaggacttttgccgcatgtttggttgcaaacatgcggttgctttagcctcggcaacggcgggtatgcatctgacactaatggcactgggaattggccctggtgacgaagtgattacaccgtctcaaacttgggtttccacaataaatatgatctgtttgcttggtgctgaaccaatcatgattgatgttgatcgtcatactttaatggtcgacgcgcagacagtgaaaaaagcgattacttccagaaccaaagcgattattccggttcactatgccggtgcgccttgtgatttagatatattgcgtggaattgctcaggaggcgggtattcccttgattgaagacgccgctcatgcattaggaacccgttataagaatgaatggattggtgagcatggcacagcgattttctcttttcatgccataaaaaatgccacttgtgcagaaggggggttaattgctactgataacaatgaacttgttgaacgaattcgatgtctaaagtttcatggattgggtattgatgcttttgatcgtcagattcaaggcaggagaccacaggcggaagttgtagaaccgggttacaaatataatttatctgatattcacgctgcgattgctgttgtgcaattaagtaaattggaatcaatgaatattcgccgtcggcaaattgtcgcccgttattcaacggcattaaaagattctcctttgcagatgttaagtgtgcccgattatgagcatattcatgcacatcatctatttatggtgcgggttaataaggatgtttgtggcattgatcgcgacacattaatggaacgtttgaaaaacaagaatattggcacaggtttgcatttcagagctgcacatacacaaaaatattatcgagatcggtatccgcagttgtcattacctgaatcagaatggaattcagtaacactctgttcattgccactctttcctgatatgagtgatgatgatgtagatcgtgtcactgatgctttacaagaaattatttcggagcacagataagtgtcatttgaacaaattaaaaaagtttctgttgttattccaatttataacgaagaagaaagtttgcctcttttattggaaagaaccttagcagcctgtaaacaattgactcaggaatatgagcttattcttgtcgatgatggtagtagtgataaatctgcggaaattctgattcaggccgcggaacaacctgaaaatcatattatcgcaattttacttaatcgtaattatggtcagcattcagcgattatggcggggtttaatcaggtcaatggtgatttaattattacgcttgatgctgatttacagaatccgccagaagagatcccccgtcttgtgaaaacagctgaacaaggttatgacgttgtgggtactcgccgagctaatcggcaggattctctgttccgtaaaacagcttcaaaaatcatcaatgcgatgattactaaggcaacaggccgttctatgggcgattatggctgtatgctccgtgcctatcgtcgccatattgttgaagccatgttgcagtgccatgagcgcagcacctttattcctattctggcaaacacttttgcccgtaaaaccattgagattgatgtcgctcatgcagagcgtgaatttggtgattccaaatatagcttcatgaagctgattaatctgatgtatgacttgctaacctgcctgacaacagcacctttgcgtttactgagtgtggtaggaagcgtgattgcagtttctggttttttgctggctgtattattgatggttttacgtctgattttcggtgccatatgggcagcagaaggggtatttaccctgtttgctctccttttcatatttattggcgcgcagttcgtcgcgatgggcttattaggtgaatacataggccgtatctataacgatgttcgtgcacgcccacgttattttattcaaaaagtggtcggagataacaagaccaacgacaaccaggaagagtactaaatgaaagcaattgtatttgcctatcatgatatcggctgtgtcgggatcaatgctttaaccaaagctggttttgatattcaggcggtatttacccatacagatgatcctaatgaaaaccattttttctcttctgttgcccgtttaagtgcagatttggcgctgccggtttttgcgccagaaaatgttaatcatcctctttggattgaacgtatccgggaactgaaacctgatgtgattttctctttttattaccgagatatgttgagtgaagatattttatcgctggcgagtacaggtgcattcaatctgcacggttcactgttgccaaaataccgtggtcgtgccccgattaactgggcgattttgaatggtgaagtggaaacaggtgtaaccctgcataaaatggtgttgaaacctgatgcaggggatattattgctcagtataaggttgctattgcagagacagataccgcgttgactttgcacggtaaaattcgtgaagcagcggaaaaactgtttgatcaagtattaccccagatcaaagcgggaatttatcctgccatacctcaagatgaaagtcaggcaacttactttgggcgtcgtactgccgtggatggtgagattgactggcacaaatcagctactgaaattaacaatcttgtcagggcagtaactgagccatatcctggggcatttactttcttaggtgagcgtaagattactatctggcgtgcctgcccgttgaatgagacgcatgacaaacagccgggaacagtattatcggtagatccgttaattattgcctgtggaaaaggcacgttagaaattatcaatgggcaaagtgaatcgggtttgtatgttcagggccaccgcctggcagtagatatgagcatggtgactgatgtacgtgttggcccaaaggcaactactcaaattaaccaccggaaacgtgtattaattctcggtgtgaatggcttcatcggtaatcatctaacagaacgtctattacgtgatggcaactatgatatttatggtatggatatcggttcttccgccattgagcgttttattagtaatccgcgttttcacttcattgaaggtgatatcaatattcatactgaatggatcgaatatcacattaaaaagtgtgatgtcgttttgccattggtagccattgcgactccaattgaatatacccgtaatccgctgcgtgtatttgaattggattttgaagagaatctaaagattgtccgttattgcgttaaatacaataaacgaattatattcccgtccacatcagaagtttatggaatgtgtgatgataaagaatttgatgaagatgactctcgtctgattgttggtccaatcaataaacagcgttggatctattctgtatctaagcaattgttagatcgtgttatctgggcatatggcgagaaagaaggactcaaattcacactatttcgtccatttaactggatggggccacgtttggataatttgaactccgcacgtattggcagttccagagcgatcacacaattaatattgaacttagttgaaggttcaccgatcaaactagtagacggtggcgaacagaaacgctgttttactgatattaatgatggtattgaggcgctgtttcgtattattgaaaaccgagaggggctatgtgacggtcaaattatcaatattggtaatccaactaatgaagccagtattcgccaattggcagaaatattacttgatagctttgaagaccatgaattgagagatcattttcctccatttgctggatttaaaaaggttgaaagtggcagttactacggtaaaggttatcaggatgttgaacaccgtaagccaagtattaaaaatgcggagcggttactcgattggaaaccaaccattgacatgaaacagacgataaatgaaacactggatttcttcttgcgtggcgccgtggaagaattagggaaaaattaatgaaacaaattggcttgagagttgatgtggatacttatcgaggaaccgttgaaggagtaccgaagctgctcaaaattttggcaaaacatcagattcaggccagttttttctttagtgttgggccggataatatggggcgccatttgtggcgtcttttacggccaaaattcttatggaaaatgttgaggtcaaatgcagcatctctgtatggtcttgatattttactggcggggactgcatggccgggtaagaagattgctaaagatttaggctacttgatgaaacaaacgctgaatgcaggccatgaagtgggtctgcatgcctgggatcatcagcgttggcaggcgaaagttggccgttggtctgaagctcagttaacagagcaggttaaattgggcgtggatgcattggtacaggcaattggtcaacgggtaacgtgttctgctgttgcgggttggcgggctgatgaacgcgtactcgcggtaaagcaacagtttggttttgattacaacagcgattgtcggggaactcatccattcaggcccatcttgcctgatggtactcttggtaccgtgcaaattccggtgacgttgccaacttatgacgaagtgataggcattcaggttaaagatgaagattttaaccagtttatcttggataagatgaaaaacagccagggagttccggtatataccatccatacggaagttgaagggatgtccaagtccacagagtttgcaacactgttggaaatggttcatcaggaaaacatacaattttgtgcattgagtcatctactacctgaaaatatacaaagactacctgtcgggagaattgttcgttctgaatttcccggtagagaagggtggttaggatgccaacaagaggcttaacttatctatgttgaataaccgggcgtgtaaggttggggcctttttgatggctcttttttttgtcattacctatttattacccctgaatggccgcctattatggcagcctgatgaaactcgttatgcagaaatcagtcgtgaaatgctgcaacgaggagactggattgttccgtatttgctggatattcgttattttgaaaagcctgtagcgggttattggatcaataatattagccaatggatttttggtgataataattttgctgtccgttttggatcggttttctgtatttttatcagcgcaattttattatatcgacttgctatgatgatgtggcataaccggcatattgcttttgccactagccttatctacatctcaatgtttctggtatttgccattggcacttatagcgtactcgatccgatgttttctttgtgggtaacggctgccatgatgtgtagcttctgggggctaaaaacagactgtaccagacggcggataatggcatatttggtgctcggtttgtgctgtggtatgggttttatgactaaagggtttctggcattggctgttccggtcattgtgatgttgcccattgtcatttatcagaagcgggtcctgcaaatagtctgctttggcccacttgccattatttcggcgatagcaatcagtttaccgtgggtgattgcaattgccctacgtgagcctgattattggcactatttcttctgggttgaacatattaagcgtttttcttccgatgatgcacagcatattgcaccgttctggtattacatacccattcttattcttggtgtgatcccgtggttgggattattacctggggcagtgatgaaaagttggaaagaaagaaaatccaatcctgaaatgttttttctactttgctggtttgtcgtgccattgttatttttcagtattgcgaagggaaaattgccaacttatatcctgccctgtatggcgccattggcaatgatgatggctaaatttggtgtcgattgcgttaaaaatggcaagatggagttacttaagatcaatggaatggttaacgtatttcttggtctgctggcggtaatagttctgtttgctatggaagtagtgacaaaacacgctttatatcagccatcagaatggcttaaatgggttttagcgattgttgcttttggtatttggggaattatcggttatctgtgttttgcgttgaatgggaaatactggttattggcggcattttgctccattgttgtcagtttagtgataggtcatgctttgcctgaaaataccgttaattccaaattaccgcagaactttattaagttacaccatcaggaacttgcaggcagtcgctatatcctgtcggaaagtgttggtcttgcgaccagtgtcgcttgggagatgaagcgtagtgatatttatatgtttgaacgttggggagaactggaatatgggttgaattatccagatagccgatatcgatatatcagctataaagattttccgcaatggttagcgaaagcacgtaaagaagggcgggtatcagtactctttcatttatataaagatgaaaaattacctgatttgccaaaggcagatcaaattagtcgcaattatcgctttgctattttggtttatgagaagcaaccatgataagtttctctttattgttgctgattagcttgctgacatgtgctggtcagttatgtcagaagcaggctgtgatgtgttggcgcagtgatgtttatcagcgggcatctgcgctgaaatggttaataggggctgtgattctattggctgttggcatgttattttggcttcgtttattacagatattgccgttaggaattgcttatccaatgttgagtataaattttattatggtcactttggcggggaaatttttctatcaggaaaaagcgggcataaaacattggagtggggttgtgtttatcatgttgggaattttgctgatgagcttgaatgaatgaaaggttatatttggggattaattagtgtattactggtgacaatagcccagttattactgaaatggggtgttgtcaatttgccagcgttgaatcttggtttgcattggtttgatattgagtggctatggagtcatcgccattctctggtggcggtaatggctggtctggctggatatctattatctatgttgtgttggttatttacgctaaaatatttaccattaaataaagcttatccattaataagcttaagttatgtctttgtctatttaatggtggctttattgccttggtttaatgaaaccatcacattattgaaaactgcgggcgtgatttttattttgtatggtgtctggttgattagccgtccagaatgaagaaggaaataactatttaactgttttacttaaagtacagacttgtttttttattgagttctggatagagtcaccttgctttgctgattttatgaggaggggttaatgataataagaataaaagagttactcttattgttcagtctgttacttattggctgttccagtcatgcccccaggactccggctcctgtgttaaagacggcgctttctgatccaatcatggtgattgctcagcttaaggagcagcttaatcaatggcgtggtacaccatatcattatggtggaatggatcgccggggggtagattgttctggttttgtttaccgtactttcagtgatcggtttgatattcaattacctcgtactaccggtgggcaaataaaattagggacccgtattgataaaagcgatttaatgccgggtgatttggtctttttcagaacagctagtggcgaacatgggttacatgttggcatttatgacgccaataaccagtttattcatgcatcaacccataaaggtgttactcgttcatctatgaataatgtttactggaagaaagctttttggcaagcccggagaatttaagtccgtttttatccgcgaattgtaaaaattattcttattaagatagcagttttatttaaatctcagtaattattatcagtaattctaattttattaattgcattttaaccatctaaaacaataattattttataacagtaaataaattatccatattgcatttaacttggtcaggtaatatctgattttgttttaaggtatattagttaaaaaagtttaaaaataaataaccagttccttaatatacaatgagctggttataatgtttattattttgttatttatagtgtgccgctattataatttttagggatgcgtaatttatttatttatttatttatttatttatttatttatttatttatttatttattgtatgaattactggattaatgtttttatagtttataactatatttttaaatgtagcaatatattatttgcatattttcaataaattttttttcagaaataaaatcttattttatgacggaaaacttaaacattatttattaaatcgacttgtttttatgagttgtgtttttatttgccagattagactaataggtgtattttcatgaggattatacccgttatctttcaagttgcctctttgttggctgcactcactcaccccggtcacatagttatctatgctcccggggattcgctcccttgccgccgcgatgcatctcgaaatccatagggtatagatcagttgctatatttcagcatcttttttgccaaaggggaatacatcgtgaaatattaacaattaacctatgaagaacaatattagatttatattttaaagaaaaaagtaagaacataataatctgatattaataatggctaatcagggatttatttattttattttaaaacagttttacattctcgcaccataaatatgattgattagccaaataatttttatcttccataaattaattatactttggcgaagagaatagacctaataacttaaatcatatcaagaggaaaactgatgacagataaacaaccttattttccagaaataaaatattctccgtggggacctaatgatgccccattatttatcatacttggacaatcaaatagttatggacatggaacacaattaccacaagatgaagaaattacacaaggtttaaaaaatatattcacattatctctatcagaagtttacagcgttgactttcccgcaatcaactggacggggctgactagctttggtgatgccaatattggcgctcctgtcggtttatctcgtggcaatcaggatcactcagtcaatgccgccaaccgttttgccaaactctggcaagaccatattaaccggggtaatgcacttaatttacctgatctttatgtcattttaatggggtggggcggtcagggcatgtatctggataatccgccggataaccgttgggctcctgaacgagatccttgcgatgtggaatcgctctatccgcgtgcgatcagaaccttgcgcatggcagttgaatcactgcgtaaactaggaaaaaatccttgcattttggctgttcattggaaccagtgggaagcagagaccgagagtttattggcggcacaggcatcagagcggaattttacccgtatcattactggtatcagtgatgctttgggttctcgcagtataccgtggagattgtattatccactttcagttgcgtttgatcccatcaacacccgctatgtgctcaaggcaatcaataatgttatcgctgatgatccccaatatcgaacgctaattgatgcacggaattcgcccgactataccggaaaggcgactgagtttggtgtttttctacctgatagtcttcattatgatggcaaagcccagacatggtttgcccaacgggaatgggagttgattttatctggttataagggggttgaactgccataggattaaataggattaaccatccaagagataccaagatggcggctagagccgtcatcttatcggtaggaataatatatccttgagtatctatgtatgccttttcggcatacatatggataaacgtctattttgtatgccataatggcaccatgtttatatggactaaaaatgcagatgaaatcatggctactaatacagaacgtaaagagacccgtttagttgcaagaacttccatagagattcaagagatcatacaaagggcggctgattactccggcgcaacactttcacagtttcttattgaatcggcaatggagagagcgcgtaacgtgattgaacgaactgaaaccttacatctttcgatagagggggctgatgctttgctggcagctttggaaaacccgccaaaagcaaatgctaaactacttaaagccgcaaagcactataaggatacagtgaatgtcggtaatcattaaagaaatcacccagcaacatggtcgtaaagcgtttgattgtggtgtcagtgaattaaataagttcttacaacagcaagctcggcagaaaaccgtaaagcatatttcaaaaacttatgtggcctgccgagattccgtgcccacgattataatcggatatcacacacttaccggatattcggtgacaactccgcttgcctatagggattacaaaaaatatcctcatccacttagtgcggtaaaattggcccgacttgctgtggattgttcacatcaggggcaaaggataggtgaacagctattgattgatgccatttatcggacagtgttggtcgcacagcaagtttcagcgattgggctgtttgttgatcctatgacctcagaagttattccgttttatcagcaatatggatttttgccagccgatcctaacgataattcacgtctcgaaatgtggctacccatcaaaacttgtatagaagtcacgagtaccttcaaaataagtcagaattgccgcctatcatgctgacggcaatctttggcgagttatacccgtcatctttcaagctgcctctttgttggctgcactcactcacctcggccacatcgttatctatgctcccggggattcgttcccttgccgtcgcgatgcaacttgaaatccatagggtatattgaagtgttattgccaactgacagtaatttctccggtttgacctgctatcggcataacgttaccgtttccaacctttaaggcgaaaaggaactgttgtgccgggcttctcttattaaatgcgtctgtcgacattcttcgtgtgcgtgatatatctatgcaactgctggtatctccctgacaaagataaaccgataaattctgaggccatccaacaacattccaagtccaagatacattgttaatctttcctgttgcaggaggagaaccgacaataggaacgttaacagtttctaagaaatttttagaatatagtgtgggcaaaacaactgaagagtgatagctgccacttgccgcaggtactgtctgtgagaatatagttaacaataaagcgccaccaataccaaatattttttttaatttcatagccattaccccaatacctgataattttctattgcgagaacttagatatacattttgatctcgcgccgtgtatctcctgaatttttataaaagcatgtacgcaataccaaagtaggcaggagtaatttgggtggattaacaccaaaaagcaatggggaatttgaatttatgttaagttaatctaatatattttgctattcgatgcttttgccagtcacttagaccgtaatcttttacaacaggatttccccatgatataaaacctgctaaacaatcaagtggagtcagcgatacgtttaatggatgttaaaaacgatgaataaattagacatgacaatcaccacttccccatgtcaggaagccctgatttacatggaaaatatttgtcgatcttatcgtatgggggaaaaatatttacccagtacttgatgaaatatcattcaccatcatgcgcggacaaagttgtgctattgtcggtgcttccggttcgggtaaaagtactttactcaatattcttggtttactggatcaaccctcttctggatattttcagtttagtggcgttaatataacaaatgttactcctaatgaacgggcgagaataagaaatcaggaaattggtttcgtgtttcagagttttaatttacttcccagaatgcaggcgttggataatgtagcgctaccattgttatatcgtggatattctcgttctctagctcggcaggaagcgaaataccagcttgagttggttggtctggcgggtcgtatttaccatcgtccggctgatctctccgggggacagcggcaacgtgttgccattgccagagccttggttggtaagccttctttgattctggcagatgagccgacaggcaatctcgatagtgctacagcacgtgatattatggcacttcttctgtcattgaaccgtgagcaaggcgttacgctcgtcatggttacacatgatgaagccatagccaaaaatatgcagcgctgcctctatgttaatggtgggcggctttccgaaactgatctgtggctggatagcctcgatgcttaatgtgaattctggtcgctacggtttttccttcgcgcaggccctgtgtgaatcactgggtagtctgcgtctgctaggaaggcgctccttgcttgctttgcttggtattgcagttgggtgtgcttctgtcattgcacttttaaacatcggtcataatgctgttaatgaagctatcagcacttttaaaagtatgggaagcaatattttagttgctcatttcagttttactccaggtaccgatgtcaaacccgcgccatctacgctggatactcaggcgctgactcgtacaataccgactatcacacatgctgcgcccctcacattgcactcaacccgtatacgctttcaaggacaagggatcgatacgaatattactggtacatcctctgatctggctgcggtgttggatttacaaatcgagcaggggcgttttctatcggactatgatcgccaaacgacctatgccgtgctcggagcgaatattgccaaacaattaaaagtcgctaatcaacctattcggataggtaatcaattgcagattggggaatatctatttgaagtgataggaattctcgctgttcagggaccgaaccctttactccccggttctattgatgattccgtcatactgcctatcgaagcaatgcggcggttgcggcctgcgccagaaattggaagcgttattgccagagcacgtgacacaacaacgctaaacagtgacgcggtgtcgttacgtgactatcttgtctcattatcaaaaggtcgtcaggttgaagttgatatcccgaaacaattgcttgatggattgacgcgtcaggcaagaacattttcctatttgctcgcgggcttagggggaatttcgttgctggtgggaggtgtgggcgtgatgaatgtcatgctgatgaatgtttcggaacgtaggcgtgaaattggtgttcgtatggctttgggagctcggcctatggatattggtatactgtttatgttggaggctgccattctggcaattgctggtgcaatggttggttcattattgggggtagtggcgggatacctatttgtaaaattttcgggttgggtatttacgttatccctattctctttgcctctgggtattgctagttcattagtgattggtctatttttcggtatcaatccggcattagcggctgccagattacaacctgtagaggcacttcgtgatgattagccaagtttttcaacgtgctattggcatcatcattgccttgataatagttgcatctgtcaaaccagcgttagcggagccgttgaatccatcacaggcaaccatgcctgcaacggatacaatttcgcttaatcagaaaactattggtctgacactcagcgatgcaatctatttagggttacgaaataatcgttcgattcgcagtgcttatctggatcgaattgcacagaaattcgatttacgcgttgctgaagatcgttttacgccaaaattactgattaatagccgttatattgctgctcgtaatcaaagcgatcgctatcgccagagcgagattacacccacatctacgctgcttggagaatatggtactcgattcagtctatcttggacgaatcggacgacatgggcagacaatgcaggtcgtagccgtaatgatggtgtttcattctcagttattcagcctttgttgcgtggtgccggcaaagatgtggccacagcacctgtacgtcttgctcaattgatggagcaaacaaatcgtttgaacctaaaagcgacggtatcccagactatcacgcaagttattatggcttatcgtggattgttgcgtgctcaagaacaattacaaatcgcacgtgatgctcttgaacgttcgcgtcaactgctggaggttaacaaggctatgatttccgcaggcagaatggcagcttttgagattgtccagacggaggctgatgttgcaatgcaggagctggctgcggaggaagcggctaatcaattggataccagtcgtttagaattgctgcgattgctcgccttagacttacaaactcaggtaaaggctactgacagattggaagctaagcgcgtagatattaacctgctccaagcgcaacatttggcacaagagcaacagccatcgtatctcactcaattgattacggcggagcaggctgcaattaacctgaccgttgcccgtaacgaacgtttatgggatgtctctttagtgggtggtgctagtcaggtacgtgatcgaacaggatcaaaccgttctcgtaattgggaaaattacgccggtgttcaggtagagatacccattggcgatttgagtcagcgccaggcggaagtgcgggcgcgggttgatgttcagaaccaggacattcgtcttgctgaggcgaaacagtcactagaacgtaatgtgggtaatgcggtacgcgatattggtacgcgttggcgtcaatatgagatcgcccagcgtgccagggatctatctctgcgcaagctggagattgaacgtgaaaaattgacggtgggccgctccagtaactttcaagtcttgagttttgaaaccgatttgcgtaatgcagagaatgttcgtctcaatgcgttgatcacttacttaaatgcacaagcggagttggacgaaacgttgggtactacgttagggagttgggatattgcacttaatgactaagatcaggggacttgcccgtttcagatataagactcgttggctcgtgacacttgctgttgcattagtcattggggctaccattgcttatgttttgttttcttcttcaattgatacatcatcaccgcaacggtgggtgcatgttgaacctcaacgactcgaaaatcgtcttgggttagttggccgtattcaggcggcaaccagtttgacgattgccgcgccatttgatggtgttattgctgaagtgatggtaactgaaggccagcgcgttaagcgtgggcaacccctgttgagccttgatacgacacaattggacattcagttgcggcaggcgctcacggaactgttgaaagcccaaaaaaccgtacaagatttggtggggtgggagaacagtcaggatgtcgctagggtacgtagagctttaacgaatgctcagttaagtttgagcgataccgaacgtaagctaaccgatacccgggctttgttcgagcgtggcattgttccccgtatggaggttgatatactggagcagcaggtcagagttcaacagctcgatcttgccgccgctaaggcggaactgagtgttgctctcgataaaggcacaggggagaatcgccagattgctgatatggaattagctaatgctcaatcgcgttatcaggcgcttcagatccagcaagcccaacgtgaattggtttctccttttgatggcattgttattcgccctcaggtaccggaatcagataagggggtatttattcaaaaggggacacgtgtcactcagggaacacctctgttaggggtaatcaatttggagcaaatccaggcggtagcgcgtattgaagaggctgacctttatcaggtgtatgaaggaatgccggttgagataaccggggatggttttgccgggctatctctacgggggcaaattaagacaattggtgtacaagggagttcaaaggagatgcagggagcgggtgtaacctatgatctattagtggcaattgatcctcttactcccgaacagcggcagcgtatccggctgagtatgagtgcgaaactggctattgtcacctatcgcaatgaacgtggattggccttgccagccgaggcattacataccggccctgatggacgaactttcgtcacttatcgccgtgaattaaacgcacaaacccagcagattgtcgtgacaccggggcatgccgttcttcaaggtgtggaggtgatcgggttggaggcaggctatgttgaagttcctgcgcggaaataactgacgcaacctcattgattttttgcgacaccctcgcattgagcgagggtttacggcagtttttgctaattttggtgcaatatctcaccgtgaaaatgcgtatattggaagttcatttgcagtcatatttaaatttttcgtgtctgcaatgacattcgacaatagcgccagatcagatgccacatgttcaatattatttactgcaactaatttgctgttatatatgaagcggaaatttcctttattttgatcaatctgtaatgtcattatttctccgacaattgcatgttcctgtatggcatttttgttcgttagatctttactgtaaccagagatgacagaaataccaatcggccacggacggttgttatgtaatagattgattgtgcgtaatactggctgtctggagaccatatcgcggggataaactctatgttgttcaagcaattgctgttcagacgatattgaatttaaaatctctgtaagacgttgttgtaaattgatatggacctccattgggacgatcatggcgaaaaaggaggaccattttgaagaatgaacagcatctcctgcttgcgcccatccgacttgaaattgagtatcatttgatgtgtgagccaaatagataaaccaagcgcatataatatgttgaacgagctcagttgaaataaaagaactatgattgagtactgttttccattcagacacatgccaatccggtattttatctatcgttgcccgcaatttaaaaggcagcattagtgttgaaaaacgctctagtcttttttgccaaaatagctcttgttcggtaagttgttcatgtatatctgttaacgtcttaatatctgatctttcaattgtggggagttgatcaccaatgtcaagtttgcattgattggctaaggtgagtgcatttattgggttgccacggctattaacaaacgaaatacgtatatcttcactacttgtagtcattagccaatggtcctcgctaatacccaacaatgtacctggtttatgatcggaacgtgtatacatcacttgtagtgtgcttatcgataccaggcgatctctcagcagaactttaggtaatgtgagtggattaggatagtaaactccgaaagttaaagatctgaccaaagatgacaattcctgagcttttttattccacaatagacagccagcagcgtctggccggcgacgtcttgagaaaaaattgcggttatcaggatcttgttgtcggcggggtatatcaccgttctctaggttgtttaatagttcggtaaatccttcggcagcagcctgataacatttaagattcagtgaaagtgcggtgtcggtatttttaagatcaatatgacgttgcacaacaatatcgccgctatcgaccatagatccgattaaatgccaggtaatagcatactgagactcaccggcaaggatagcccaagaagtggcatggctgccggcatagcgtggtagaggggcgtcgtggtagttgaaagcaccttgagagaactgattgattaatagagtagggagaataactggattgactatggaaaaaagccagcatattgactcagttttggagagcgtcaagagatcttctagtgcttcaacacagtgtatattttgagaagttgcccattcgaaaaacagagattccgtgggaaaaatagccacaattatgtatccggccgcttgaagttgttgggtacaacgtatcgcaagtgttgtaccaccgatgacgacacaagatcgagcttttctagtggagtggtttacaattttgcacttttcaacttttagtgtgttatcggttagtgtgttatcagtgctattttttttctcttgcgttgaagatgtgaattcgccgggcatgttatcccctttatcgttattgagtgaagggatttgtttgagagtaagtaaagttcataggcttagttgccttgaactgcatttaaacacagacaaaccccgatattgctcacttacctttgattcctttatgagggaagccatagttgcctgaattccagacgatcaacaaagctagcactaacagaacaagtaaggtccacgggaacgagctggcaccaagtgtttcaagtaatatcccgccaataatgcccccggctgcaatggctaaattccataaggtaacaagaatcgactgagcaacgtctgcaccttccccggcagattcggccaatgcagtttgaagtagggcagcggcaccgccgaaggttagcccccataagatcacggcaagaaaaacaaagacaggaagagtaccgataacaccaagtatgagagaggcgaatgtaaatagggcaagacttatcagtaccaacgaacgtaacatcttgtcaattaacagccctgtcatccatattccaagcaacgacgccacaccaaaggctaacaacacaagatcaatcctggtagcaagccccgcctgtgtcacaaaaggcaatacataggtataaagaatactgtgagccagtacccaacaaacaagaacgcttaataccggtcgtactccagggatcatgataacttttttgatcggtatacgtttttcggcagtccgtcctgggtagtcagggactttcaacatgacccatgcgataacgaccaatgttagaatagacatcaaaccaaaagttgtacgccagccaacaattccaccaatgaatgttcctaatggcacgccaagagagagtgccagtggtgccccgacaccggctacagccaatgcacgtccttttaaatgatcgggtaccatccgtcgggcatagccaaccaacattccccagattaagccgcctgccatgcctgaaagaagtctggccgcaagtgccactatatagttagacgttaacgcggtgagcgtattaaagactaacaaacccgtaagtgccatcaagagtaatcggcgacggcgccaaccttgtgttgctgtcgtcagtggaatcgcagcgacaagtgagccaattgcgtagagtgtaacgaattgaccagctaatgcttcagaaacggccaagctgtcacttatttgggatagaatgcccgccgggaatgtctctgtgagcagtgcaaggaatcccgtcattgctaacgcgagtagagcaacgaaaggaaaattggtactgcccgcatgagtggcagttttttctttaatcatggaaccccccttaaataattttcattgtgttgtttgcagaagcaatcaactcaagaatcgagctaattcgttaacacctgattccttaagtacctcgaaatgatcaacgttaagattgatattttctgggggatgttttaggtagggtgttgcttcttcgataaaagaaacggcatcgtcacgtgcattaaacaccgtaattggcgccttgattattcgttcttgcagttctgttgctgaatatttctgtccgtaggtttgaataactatcctggcaattcgaacaattaacgtaggggccagagttgggtagtgcttatgaacaaaagagacaaagctttgctcatcgataacgttagccaggcattcattcaacgctgaactgtgagaagtgcccgcaaatacagagaataatagtgatatcaactcattgttttggtaagtagacccgttttctgttcccgtggaattaacgtgatattttatcttcgagagccctggagcgattagaaccaccttttcgacatgttctccggctcgttctaattggtaagccgcttcgaaagccaatacagagccaaaagaatatccccatagcgtgtatgggccagtaggttgtaattttttgatttctgttatgtcttgaatcaccatttcggctatggtggagtatggaacctctccttcattaattccgtaagcttggatgccataaaatgatcgatcagtgcagatctgtgtagccagcaggtgtaaattcattgggtatccacccaatcctggccagcaaaagacaggtaatccagcatctttttcctgtaaacaggccaatcgtgaagataatctggttacttcaccttcaacgatttttgccaattgtttaaccgttgcggcctcaaatagagtatggagaggtagcgataacgcaaattcttcatttaaacgttgtatcagatggacggctatcagagaattgccacctaaagcaaagaagtcatcttcggtagatatgctttctcgcgttagcacttcttcccatatctttacgatctgtgtttctgtcgaggtgcttgggagtacctgtggactgtgtgatactgtgctgaccagtacttgtaatgtgtcgaaatcgatttttccactggaagttagcggcatggtatccaggaacaaaaatctgtcaggtaacatatagtccggtaatgttttgctaagttcactccgcagaattgaagtaatgtcatactttgcttgctggcgtattgtttcatcggctaattcaatacaggcggttaatcgtgtcgaacggtgttgagggtctttttctgccaaaattgcagcgtgtttcacttgatcgataacctctattgcattttttatttcttctaattcgacccgcatccctctcactttaatttgattatctttccgaccagcaaagtgggcattaccctctttatcccaataagccaggtctccggttctataaagccggattttttgcgtatttggtggtattgcaatttcaagaaagtgcttttctgtgagatcctgacgattcagatatcctcttgcgacttgagtgcccgcaatataaatctctccaatttcatattctgaggcgagctgatagtggtgatcgagaataaaaaattccgtattggataccggcttaccaatagggactgaattaacttcgtcagatattgggtagtgattaacaaggaaaactgaagcattaattgtacattccgccgggccatacatattaatcagtagacagtttggtagtgtatggatacattgagtggcgagttttcttgataggctctctgctccgatgaatatttgccgaagggtgtggcattcccggaattgatgattatcgatcagtgcttgtaatagcgtgggaacacactgtaacgtggtcacattgtggcgaataatcaggtcaatgagttggggaatattcctgtgtgttccagatgagctaataacaacccgactaccacaactgactgataatatttcccattgagcagcatcaaagctgatgggcgttttctgaataattgttttttcaatatttaaatcgcatttttcatttaaccaacacatttggttaacgatactgcggtgctcaatcattacacctttcggtttccctgtacttccagaggtataaatgacataagccaagttatctgggctaaggtagtcatggagggtgttgttggtaatggcactggattcaaatgatttctctacgtcttcaagagtcacgatatggatattttctgcaaccaacctgaccaatttttcctttaatttttcttgggtaaatatcattttcagattgctatcgtggatcatgtaacgaagtcgttcctctggataatcatgagacaatggcagatatgcaccaccggcaaaaagagttccccaaactccgatcatctgctcaatcgacggttcaacaaatataccgacgcaatcacccgctaaacatcccaggttttgcagatagcaggccagatgtacactgccaattgccatttccaaataactgagttgctcttcaccgtgaatgactgctgtagcccagggagttgatctgacgtgtgaaaagagtaatcccggtaggcactcttttcgttgaaaactcgctggtaacttaatgttgtttaacgttatccaattttcatttgccggttgagcgctggagatatcgtattttcgatactgtcctgtttttaatatattgcgccattttattattgggagagttgattgcatcttattttatacctttatttaaggagagaagccaaaaggagagcgtatcggcttcttctttaactagctgatatttctgtggaataaaattaaaatattccaacttagaaaaatcatttcctggtcttataaatccttcctttaggaaggggctattcaataaattgcggtaattcaatattattaactatcatgtttgctctttttccactctgacgtttatttattaaatacctgggataaattatctctatcgacttgatgattcttgtatttagcaaacctgagttatctgttttttttattaataaatatgtagatataagataatttctcctaacgcctatactacttgctaccatagactagtgaacagtaggatgatgttcaaaacacttatgaccaatctgtcagcaatgggggaaatatggatagtttgggatcattgaacgtgttcgttcgggctgcggatgcccgtagcttcacagttgcaggtcaacaacttggcatctcttcgtcggcggttagtaaggctattgttcggttagaagagcgtctgggaatacgccttttccatcgatctacgcgaaccgtcacattaacgcttgaagggacattattctttgagcggtgcaagcgaatccttgatgaggttgaggctgctgaaactgaactatcccagatgcagaaaatgccaagtggaaagctaaaaattagcctaccgtcagttggtatgctgtttatgccgaaatttgctgcttttactcgcctttatccagagattaaacttgatataagttgttccgatcgaatagtggatgttattgaagagggatttgatgctgtactccgaaccggtgatccacgtgattctagattaatgtctaggatgcttggttcttaccgccaggttattgtcggctctcctgcctattttgcggccgcaggttttccagaagagcccgaagatcttgttagccatccgtgcttattatatcgctttccaacaaatgggaaattaaacgtatggcctttgaatcgtgatggtaagaaaattgagcttaacttaccgtgtaatatggtaacggatagtttagaaccgcaagtctgttttgccgagcatggtcttgggatagcttgtgtgccgaatatcgctgtttaccgacagttgaaagaaggttctttggtcactattttggataaatataacgaaagttccacaatttttcgtatactttggccatcaagccgtcatttatcccctaaggtcagggtatttgtagattttatggcggagaacctcttaccttcttaaataaattctgcaaagtggtctatattatagagacataaagtggaaatttactttatgaggttgagcatatattgtacgtaaaaataaattatagaaaaaaaagttgtattaaaacgcagtaagccatcctaaataacataaaggagagtatctaacatgttagtacgtaaatcgttgttggccctgtttgcaactacttccctaactgccgcgggtatcgcttatgcaggtccgcctgtaacggttacatttaagcatcttggtgcgtctggtagcgcagatgctgtttataccatcattactaataatgaatccggtacctatgccaatgcaacacctaaacctagtgcaagtgtagcgccaggaggagtcaatagttatcaggttcaaagcccgctttcacctgacgtaaattatgcaatggtgcgatataaaatagggggtaaaacctgcgaatttatgaccacttttgtgaacggatatgttaatggcgttaaaattccgaaatggaataaaggagcaacgccgagtggtggtgctgtttgtaatgcaaccatcacctatactaattattttacctacgcatggtcagttgaatttacgatgaagtagtgaacactgagtcagattattctatacccgttatctttcaagttgcctctttgttggctgcactcactcaccccggtcacatagttacctatgctcccggggattcgctcccttgccgtcgcggtgtatcttgaaatccatagggtatataagagatagatctggctcatcttgttttttatcatttttttctgatgtagtgattgtaattcaactggctattgtgatttttaatggccgatcggatttcaatgcgaaatagaattccctcgttatctattgtatcggctatataatcgcagatatcacgttgcttttaagtaaacatctcatgactaattctgtctagtgaattgatattcaattaaattcaattaaatactatatgcattgcatatgaattttagattatctgtccgttatattttttgtcttgaattttctgttggttatataattactaaccactactattaggctggttttttatttattgtatgtttggtgtaaataacgaaatatatgcaacatgttagcactaggttaaaaataaaaaaacatacggtaatttaatttattattataaattaatgctgaatgtttattttttttagttttgattttctttggtcttttattgacgcactattggttctacactatttttaaagttggaaagtgttttaattttttataagtttatggattatgatagttgaatatggatgttcagtaaattagttgagtttttcggtataatgtgaatttctatgtttataatttggtgtgaatttaaccttgtaaggaataatatattatgattgatcaaaacaattctaataatatagttacccctaatgtaacgatttctgatgtaactgtgtcctccattcaaattgctccggaaatagccagagacaatgttcatgtaatcattgttgatgacaaaggtgctccacgggattttcttttagataactctgatggtggttatcaagggagtggtagtttaatagctttgattcttgcacatcttaattcaaaaaaagtcactattagaactaccggatatgaatataataaacatggatatatcaacggcgtattaattaaggaggataagggaggtggtggaacaggcggtggaacaggcggtggaacaggtggcggaacaggtggtggaacaggtggtggaacaggtggtggaacaggcggtggaacaggaggcggtgcaggaggtggaacaggtggcggtgcaaaaggtagtgcaggaggtggaagcgggggatgataaggacggtagaaattaggaatgagaattcttatagaaaatattattcgctattatttacgttaaaggtattaaaagtttatcccattatgttattttatttgctattttaaattttggtagtgttcaagatttttgtaaaataacgtctattaggtaagtagtgaattgtaattaattataaatgaaaaccctgatatttaattttcagggtttttactttttaatgactgaatataaactaaattttaggagcagtgttttaatatttctgatcggattttttagtgttttttagtgttttttatttacttgttgacagtgaaaatgatcctgatgattgaataaagaatactatatattatagttatgatttatatgaaaatatttttattttttaattatattaatcagtttgtttatcgtgcgttaatgtaatttaatgggttttattgtcatttaataaagttattatccgaaatcacttattctggtatatgtggtaattgttctagaagacttatggggatttgttctttatttttagtaaataaaacgaggctagccaatagttatctggaaaattcttatttggttttttgatctataccctatggatttcaagatgtatcgcgacggcaagggagtgaatccgcgggagcatagcaaacgatgtgaccggggtgagcgagtgcagccaacaaagaggcaacttgaaagataacaggtatattaggatgttagcgaattaaaatagtataagagttaaatggtcaataaaatattgaccattagggaataccatcaataaggttattaggaactcggttattgcttatgccctaagaagtactttaattcaggtagattaccattttctctaaatctagcaggcgtggtatcaaagtgttttttgaagatccgggtaaatgttgcctgagaactgaaaccatactgtaaggcgatatcaaggattggtaggttttcttcacacagagatcttgctgcttcgtgtaaacgccgcttacgaacatattcacccaaggtatagcctttcacttctttaaacactctttgtagatgccactttgaataaccgcttctgtcagcaatggtcgctatttttataccttcgttacgttgaagctgagtttcgagccatctgacaatatcatttactacactttctgacattttcacctcccactgatggtgggctagttgctaaaatattagatttcgttagttattttcataaagataataacggtagttattaatgagtgtattttaaaataaatccgggatatctataggcaaaaaatgctatttataattgataattattatcatttatgcaaatttcctttgttttaataataagtagcatcaaatgatcttcactaatttacttaaaacagtatcatcgttcgtcgtttaatttaatggaggttgtaatgcaatcggacttggcttttttaactaaaaagttggcattttttgtactttatgctctgattttagccacggttataggtttactctttattgatgttatctatttgcagaatgcagtgaaggagaactcattaactgaaattgctcaggagagtatactgtttgttatttctgctgtatttctgctggaagcaaaaaagaatagtcaattacgtcctgcattagtcttgatatcaggtttttttgcttgtttattgataagagagctggatgctatatttgatgaaatatttcatggtgcttgggcgtggattgctattccgttagcactaatttgtattttttattctgcttataaaggcagggatacgttggctgggcttgttcattttacgcgccatcaaagttacagcatgatggttgcaggtattttatgtgtactcgttttttcccgtttgtttggtatgggagaattatggaaaggtttgatgctcgaacattttgatcgaacagcaaaaaatatggttgaggaagggtgtgaacttctgggttattgcttgtgcctgatttcaactttttggtatttgcctgatgcaataaaacttcgtaagtaaagagtaagacaggcaagcgattgaaataatttgcctgtcaaatttactgttactgcctcaaataaatctgaggctgttgagtctcaggatggcgggtaatgccaagatctgcttgataccattttctcagagtatgatcattcagtacttcttctggtgtacccgcagcgactaacttccctttatgtaatagaaagattttatctgcatagagagcagcaagatttaaatcatgtagaacgcaacacatagccataggttgctcccgtgtcagtcggtaaagcagacgcaaagtgtgttgctgatgatagagatccaaggctgatgtgggttcgtcaagaaacaaacagcattctattggtgttggatgccaaagttgggcaaggacacgagcgagttgtactctttgctgctcaccaccggagagttgccggtagtcgcggtgacgtaacgcttggcaatccgtttgttcaataacggtatcaattgctgtttgtttatgatgaataccatgaggagagcgccccatagcgaccacttcttccacactgaaagggaaggagagtgagctatgttgacgcatgacggcacgagtgcgggctaattgttcagcaggccattgctcaataggtgtgccgtgtaaatcacattgcccatgctcaggttttatatatcccgttaatagccgcaataatgtggatttccccgcgccatttggcccaataatggcgacaatctcacctttatttaccgagagcgaaacattatcaataattttctggttgccaattgaatagcttaaattctgcgcttgcagagaaatattattttttatggcattcattatgtgcggctccctggttgtttgagtatcaaccatagaaaatatggaccgccgattaaaccagtaattaggccaacgggtatttctgctggtgagactaatgttcttgccagtgtatctgcggtaagcaggagagaagctccgcctaaagccgcgccgggaagtagccaattatgatcaccaccaaatcgcattctgatcaaatgtgggacaactagcccaataaatccaataacaccgcttaatgcaacagcgctgccaatcagcagggcgctgagtagtaataactggaatttagtacgttggacatttataccaagatagtgggcttcttcatctcctaattgcagcagattcagtttacgggcttggctgaacgttaggataatagtgggaataattaaagaagctgtaattgccaacgtcggccactctatctggctgagtgaacccatcatccataaggagaattgtcgtaactgttgatcgtcactgatatagctcaggagaccaatagcagacatacaaagggcattgatagcaatcccggcgagtaataagcgggccagatttccgtagttatatttattgagtgaaaaaatcagtaatgaaattaacaggctgccaataaaagcggcgataatatgtccgtacacagtaatgacagatggcaggctaacgggcagaacaattgccattgccaccatcaatgcagctccactgctaataccgagtaggccaggatcagcgagtggattgcgaaataacccttgcattacagccccggaagttgctaaagcacagccaaccagtatggctaatagcacccttggtaatctgatattcagccagatttgccactggggttcactaatggaagattcccataatgtcttgaaagataatgataatgcgccaagattagcagaaccaatagccaacccggacagtaacaaacaaagaaacgccaagcccaaacccggagacttcatacggctcattgagtcttctccgccgcctgtctgagttgtttcatcactgagggggtttcgaggccaaaaccgagtagccccatatcatctacaattaaaacccgttgtttttggccggcaggggtgtgtttcaatccgggtaattgccagattttatccaaaccgcccattgatttaataccatcctccgtcaccaataacagatcgggtgcgctggcaataacaccttcctgggaaagtgggcggtaattgttgaaaccttgcatggcattagtggcaccaacagcgcgaatcattttgtccgctgcggttttttggccggcagccattggcatgataccgccgtgactcatcacaaacagaatacgggtcggcaaggtggttgttggtatttctgccagtgctttttgatattgttgaatcagttgtgcaccacgttcagcctgattgaccgccttagcgacggtcttaattttttcaggaacggcttctaacgctgcttttccggttatctgaatcacttctacaccagaatcctggagctgcttaagtgccagtgaaggctttgccaattcactggttagcaccagtgtcggattcatagagagaataccttcagggttaagcattctcatatagccgacatcgggtaaggtaagcaattcggttggtttctggctggtgctgtctctggcgacaactttatcaccttcaccaagtgcaaaaacaatttcagatacatcgccaccgatagtgacgatccgttcggtggagaaagcactgaacgataccgcaagggcaaatgttagaagccattgtttcatgctacacgctcttcctgtattgattgcagttttggcagagcagccacttgctcacgccactgagtttgttcaggagtgccttctgtacgctgaccaaacagttgcgcaatttgatcgccattagcatcaaatagctcaaggctggtgacaaaaccatcctctgttggtttacgggttacccagctttcagcaatagcactctctattaaatgtagtgtgaaattgcggttaaagatattaatccatttctgatctgagttttcttcctgatggggcatcaggcgttccagctttccggtgaaaatttgtacgcaaccatgattgctgacgaagatcatgatttcattctgatcgttataagcggtgttgataagttcattcagtgcggaattttccaccttgtaagccagatcatcatgtaccgcgttgaaaacctgttgacggctcagattatggtttttaagtaacgtgaagaattgatgaacgttagtcattgctcgccattcttcatcaagctgtgctttcagttcatttgttagagttgaataggtgatttcttctataggtttgatgaccagtgcggggttgtcttctgtctgatatttttcgatcagtgcttcccaggctgtcatatcagtattacctgttgcataaactttatgcaatgcgtcaccctgatgatcaaaaaattgaatgctgtggcgcataccattttttgcgggttcaaccagataaaatacactactccagtgtccaaagaatatccgcaagtcgagttcacgagggttcaagaccagccctgcgtggctgctgaaatgggtatttacataccggccaatatgttcatgaacagcaaaatcattgcgggtgatcgctttaatttcaccaacaacagctaactcttccagtaaagttggggcgtcaacattgaggcgtttggcatcgataccaacgcggctatgtaataattcgccttcactgacattcagataggctgccagatcacgggcatatttggctttgttatcagatttggcttgtagataacgttcataaagtgaagaattcacaatttaactccttgaaatacatttatttaattaccactggtaactgacgaacagtttggcattgcggccatcctgcggtgttccctgtggtgagtagtattctttatcaaaagcattacctaaaactgccgtagtagtcacacctttgagcattccttcaccttgatagctgacatagaaatcattaacgccataacctgcctgttgtttaggatctctacctctagcatctttacctttgaagtcagtatgattggtgaattgacctacccagccgacagagaaaccggtttgtgcaatagggatttccagtatgctagtgatagtatctgggctgaggttatcaagagatccaccgcttttttcatctttaccttctgtgcggttgtaagccagttcccaagagaacagattggattcatagtttatagaagcatcccatccccagatcttggcgctggatatattaacagatgttgtgttccttcctcggttgactatatctgacttaatataatctttggctttagtatcaaagtaactcgctttaaatttcagctcgtcgttatctgctagtagatcattgaaacgtaatccaaaaccagactcccacgtttcgttgctttctgggcggagatttggattaggggtccagaagtttccaggatagtgcatagaatcgttatacatttctcccattgtcggtgcacggaaagcttgagcgtaagaggtaaacagcatcgaccagtcagttggtgtgatactgatagcccctttggaagaccatttatcggcgctgacagcctcatctttagaattgtttcctttatagttgtcatagcgcgtacccgcgacaatagagactggcaggtcgcgcagcgttatctcatcttgtaaccagccggaataaaagcggatatccgcgtcaggaaagctatctgtattaccatctggggtctgtttctgtttgtaagtttcaccaccgtaagtaaattgatgtgccagcgggctgtctgtccacaggcgggagcggttttccaattttacgccataggttttctgtttacggccttcgaaacccttcgccttagtacgagcattaatagtgatatcggaataatagaggtcagttttggcatttaaccaatcatattctgctggatttaattggtagctgagttgggcatcacgttgagttgtcgtgcggtcagtccaagtgctaggatttttattttttccggtgagtgtttgtggatttttaggttgattagcctcattacggtaatagcgtaattgactgctcagggactggttgtcatcaattttccaactgccttttgccattaagttactgataaattcatcattatcgccaaccacaccaccaccgtgacggatgttacctgaatcacgggtactgaaggcaaatacaccatccagggattccgattttgcaaaagttgcaccaccaaaacccatactatggtcacctgttgcaccgcgagcaaaaacgcggaatccgtgatcttgacccgcttgcaaaaggtctgcggcatcgacagtttgataagcgatcacaccgcctaaggcaccactgccgtagagtagggcagaagggccgcgtacaacttcgacttgtttaatgagtgctgggtccaggaacgtaccattgatatggccggtatcggtaccttggcgaataccgtcaatcaacgtcaaaacaccttttggaccgtaaccacgcagactaacatcttgcccattagcacggtttataccggctatattaatgccgggtatttttttgatgagatcgttagcattaccggctgtctgactttgtggtgactgactatttatcaccgttaccatcatgggagcttcgaaactgtccctttcattgcctgtggcataaaccgttatcacctcgcgggatgatttatcactgttagcatcgggcgattttgttgctgcataaacagccggaatgttactgataattgccaagcttaatgctgataatttgagtgttgatcttgcagattgagacatcaggcgaatctccataataatattttatgagttatggatatagctggctgccccgatacgtgatctgggtggctggctgagttattattttatttagttagtatcagcttaccggctttagtttggcgcaattggtagaattctccttggtgaagaattctggtaattcctagctcacctaatagttgtttactgtcaatgtagtcaatttctacaatttcagcaggataagtgttgcattgttttttaagtgcaatgcaagaatgttggtgacatattttagtcataaaaccactttgcgaatactaactattatcatagtgagaattattatcgttatataaagaggtgacttcaagcaatatttttggtggtcaggagcaacacattaatgaaatttaattaatgtgttgtcagttagcctcttatgaatgaaaaaggctaactcggaataaggattcagaaacggtaacttactgcttcggcgagaatgtcaataagctgttctgtatcttgccagtttagacaaggatcggtgatcgattgaccgtaatttagcggttgtccctgaatgacttgctgggtgccttcaaccagaaaactttcaaccattacaccgacaatagcggtagaaccctcttgaatctggtgacccacctcttttgctatagtcagttggcgtttatgaattttttgacaattaccatgactgaaatcgataactaaatgttctggtaaattaaattcacgtagttgagtacaagctgtagcaatatctttggcactgtaattaggctgtttgcctccacgcataataatgtggccgtatgggttgccttcggtttgatagatggtcatctgaccgcgcttatccggcgagaggaatgtgtgacagaccccggctgcgcggattgcatctatggcgatacggatgttgccatccgttccatttttaaagccaactggacaggagagggcagatgccatttctcggtgaatctggctttctgttgttctggctccgatcgcgccccaactgatcagatcggcaatatattggccggtcaccatatccagaaattcggttgctgtgggtaaacccaactcattgacatcaaccaataatttccgggccaaagtaataccccgatttacctggcaagaaccgtcgagataggggtctgaaattaaacctttccagcccaccactgtgcgtggtttctcaaaataggtgcgcataataatttccagtctgtgctggtatttttcacgtaacctgttcagtcgctgagcataatctaaagcagcatcaatatcatgaatagaacaaggaccgatgattaccataagccgtggatcattcccgctgagaatatcggcaatacgtttccgtgacgctgtcacattattgacgattttttcggatacaggaaattgaattgcaagagtttgaggtgtgactaaactatcgacacggtgagtccttaaaccatctgttttgtacatatattttctcaaagttcgtttcacattagcaggcatatctatagataatggaaattacaataaacgaaaacggctaagttaaacaaatgatataattagtcatatgataaatttttttccattattcctattgatatatttttaaaacattcggcggtttagcttcatcatgtcgattattttggttgagatttcttcaacagaataattggtggtgttaagataattaatcttattcttacggaataaagcttcaacttcggaaatttctattctacattgcctcaatgatgcataacggctattttctcgacgttcttccctaatagctgccagccgttcagggcttatagttaaaccgaataacttatgttgaaattgttttaatgtcgcaggtaattgtaaattgtccatatcatccgcagtaaaaggataatttgcagcctgaataccaaattgcatggctaaatagaggctggtgggtgttttcccacagcgggatacgcccaataagataacctgtgcctggtcaaggttacgtaaagagataccatcatcatgtgccagggcataatcaatagctgctatacgtgcatcgtactggctgagattcttttcagtcagaccgtgagtgcgattaagttcgggttttggctctaacccggtttcttgctgtaatggggcgaccagtgtttgtacaatgtcctgacaaaatccttcgctactggtaataatatttttcactccagaagagataatagaatagaaaactaaaggtcttatccgcgtatcctgatatatctgatttatttgttgctttatttcttctgcgcgggtttcactggcaacgaaaggaagagtataagaagttattttgatgggaaattgtgataagacagcatggcccaatacttctgcggtaattgccgtaccatctgaaataaaaaagacagtgcgttcaacgccttcaacactattacgaccattacgttctgctgatgtttctaatctgaattttgccatgatatttacagtgaccttttatctttccaatcgtttagttaaatgaaaccgagagtcgattttctgcaaagtatacctaagaaaaaaataatgtgttgggttgatcgattcacctttctatgtgtgcgaaaacattgtgttagtctatttgtgactgctctatgcagtgctaatttcccgatttgtacccaaatgctaaaaggattgttttaatgcccaataatgacctcaccccgcgtaatgtgctttggtataaccaattaggtatgcatgatattgaccgggttggtggtaaaaacgcctccctgggagaaatgatcactcacctgtcagagttgggggtttctgtcccgaatggtttcgccacgacagcacaggcatttaatgatttcttggaacaaagtggtgtcaatcagcgtatttatgacttgctggatgaaacggatgttgatgatgtcaatcaactggctaaagcaggtgcacaaattcgccaatgggtgattgatacgccatttacgtcacaactggaaaaagatattcaggatgcttatcaacagttgtctgaaggagagcctgaagcctcttttgctgtacgttcttcggcaacggctgaagatatgcctgatgcctcttttgccgggcagcaggaaacttttctaaacgtgcaaggcattgatgctgtgatggttgccatcaagcatgtgtttgcttcattgtttaatgatcgcgctatttcctatcgtgtccatcagggatatgaccatcgaggagttgcactatcagcgggtgtacaacgtatggtgcgttctgatctcgcttcttccggtgtgatgttcactattgatactgaatcagggtttgatcaggttgtttttattacctctgcttacggattgggcgagatggttgttcaaggcgctgtgaatccggatgagttctatgttcataaatcaactctgaataagggtaaaccagcaatcgtgcgacgcaatctgggttctaaaaaactgcatatgacctatgctgacaataaagaacatggcaagcaggtacgtatcgaagatgtaccagcatcacaacgcaatcgtttctctttagctgatgaagaagttgaggcattggcgcgtcaggcgttattaattgaaaaacattatggccgaccaatggatattgaatgggctaaagatggtcataatggcaagttatacattgttcaggcgcgtcctgagactgtccgctcaaaccagcaagttatggagcgttaccaactgaatgaacaaggtcaggtattggtggaaggacgtgccataggccatcgtattggtgcaggtcgagtaaaagttattcacaacttgaatgaaatggatcgcatccaaccgggtgatgttttggtcactgatatgactgatccggattgggagcctattatgaaaaaagcggctgcgattgtaactaatcgcggtggccggacctgtcacgcagcgattattgcccgtgaattgggcattcccgcggttgttggatgcggtgatgcaacggaacgtttgcaagagaatcagtcggtgacagtttcctgtgcggaaggtgatacgggttttgtttatcagaatcaactgaattttactgtacaaagttcccaagtcgatcagttacctgaacttgatgtaaaaattatgctcaacgtcggtaatccagatcgtgcatttgattttgcccgtttgccgaatgatggcgtaggtcttgctcgtttggagtttattattaatcggatgattggtgtacatccccgtgcattactggagtttgatcagcaaactcctgagttgcagcaagagataaaatcgctgatggctggttatgacaacccggttgagttctatgttgggcgtttgacggaggggattgccactctggcggctgcattctggccgaaacgggtgattgtccgtttgtctgattttaaatccaatgaatatgccaatctggtggggggtgacatttatgaacctgatgaagagaaccctatgctaggtttccgtggtgcagggcgttatgtttctgacagtttccgtcgctgttttgcattagagtgcgaagccgttaaacgtgtacgtaatgatatggggttgaccaacgttgaaattatgatcccgttcgttcgtacggtagcgcaggctgaagcagtgattgctgaactggcatcccaagggttgaagcgcggtgaaaacggattgaaagtcattatgatgtgcgagattccgtccaacgcaattctggcagaacagttccttgaacattttgatggtttctctattggttctaatgatatgactcaactgacgcttggtttggatcgggattctggggtggtatctgaactatttgatgaacgtaatgatgcggtcaaagctctgctctcattggctatccaagcggctaagcgtcaaaacaagtatgtaggaatttgtggtcaggggccttcagaccatcaggattttgctcattggttgatggaagaagggattgatagcctgtcattaaatccagataccgttgtaaaaacttggttaggattagcgaaagtgagttaattgagaataatactcgattgaaactaaaggctcgtcaaaataatggcgggctttttaacaacttgagtcgttaattatagttctacgggaaagtataaaaatagcgaaaaaaaaagcctatcatgggcgtgataggcaaggactacacacagcaatataggcgtttctaacaagtagaaccatcaaaaggagaaataaacgtctcgttcatagcccacttatattaatttagttaaatagtttattcattaagaattgtcctaatttcagtattatttacggctaaaatgagccaaatttaactattttttaacaatttattcacaataatgatatttaataaatcagcacctcagaaaagtgagaagttttattaaaattatgctttagcgaaagagctaacactctttcgctatataagtcagaattcattatcataaaaatttattctgaaaatttctgttccagatatttttcagtttcggctaaatcattttcaggttctgggacttcattcatccatgcgattaataaacggtaagcaacggctaatacaacggggccgataaataagccaatcatgccaaatgagagtattccaccaataacgcctattaatatcagcgccataggtaaatctgcgcccagacggattaaaaatgggcgaagaaatccatccattgtcgttacgatacagctccagaccagtagcacggttccccaggttgtatcacctgtccaataaagccaggcaacagcgggaactaaaatcagtaatgggccgagttgagcgacgcaacagacaaacatgagtactgtcaacaacgtagcataaggaatgcccgaaacagccaagccaagaccaccgataatggcttggaccaatgcggtaaccaccacgccgagcgcgacggcacggatggattgtgctgccaacaggatggcggcatctccgcgtttatttgccaggcgaatggcaaaatggcgaatactcatcgtcacctgttcgccttttagatataagagcacgctgaatagcaccatcaaacagagatggaatacaaaacgcccggcatttgccgcttgagtaaagaaccaggttgctgcttctccaacataaggctggactttagctatcagaacattgccaccgtcagtaataagtgagttccaagcgctgtaaagtttatcgccaaccagagggatactattcagccaggtcattgtcggtatttgaaaatgagagggggatttagtccactggattaatggcgcgctgttttccaataagctactaaccagtaatgcgatagggatcacgaataatagaattagcagtagcgtcatgatggagaccgcaatccagcgtttaccccacaagctgtcctgtagtttttctaataatggccaggtggcgataacaaccatgccggcccagacaaaaccgaagataaagggttttatcacccaaaagctggtaacaattaacagtgacaggaaaattaaagtaaataatagttttggcaggtcataatacggttgagatttgtccataagttaatttctctcagggagttagtggcgctaaggtgctaaagataatgaataaataggatgttatctatacctgttatctttcaagttgcctctttgttggctgcactcgctcaccccggtcacatcgtttgctatgctcccggggattcactcccttgccgtcgcgatgcatcttgaaatccattgggtatataggttactcaaaataggtgaatattatgataaggtaaacgcttgccttatcagacaaatcagttaacggtagtaaatggttacggctgattaaggcattgattcaaagatagtataaatggagcaatgtggacactcattttaaaagggtcaaaacgataatgatcccacgcatatcacaagcaccgcacgtcagtgaggtggcgcagaagttcttggatacattgaaggaacaaggatttaccggagatgttgccagtagttatgccgatcgtctgacaatggcgacagataacagtatctatcaactcttaccacaggctatcgttttccctcgatccagtgcagatgtggttttactggctcgtgtcgcaggtgaaaaagagtatcagaatttgacatttacgccacgcggtggcggtacaggcacaaacggccaggcgcttaatgacggcattgtggtggatatgtcccgttatatgaatcgcattcttgagattaacccggcgcaaggttgggtcagagttgaggcgggggtgattaaagaccaactgaatcaatatttgcgtccatatggttatttcttttcaccggagctttcaaccagtaaccgtgcaacattgggcggcatgattaatactgacgcatccggtcagggttcattagtctatggtaaaacttctgatcatgttcttagcctacgggcagttctattagggggggaattacttgacacccgcgctatggatatagtccaggcggaatcgattgcgcaagaggattcggttaccggtcgcatttataacacggtgcttagccgctgccgtgaacaacgtgaacttatcgttgaaaaattccccaaacttaatcgctttttgaccggttatgatttgcgccatgtgttcagtgatgacatgcggaaatttgatttaggtcgtatcttaactggttcagaaggaacgctagcttttattaccgaagcggttttggatattaccccgttgccaaaagtcaggcgattggtgaatgtgaaatatgattcatttgattctgcactgcgtaatgctccttttatggtggaggcaaaggcattatcggttgagaccgtggattccaaagtgctgaatttggcgcgtgaggatatcgtctggcactcagttaaggaattgataacggatattcctaacaaagatatgcaggggttgaatattgttgaattcagtggcgatgatcagcctttgatagaccggcaagtagaaacactttgccagcgccttgatgaactgatggatggcaatcaagctgggattattggttatcaaatttgccgagagttagctgatattgagcgtatttatgcaatgcgcaagaaagcagttggcttgttgggtaacagtaaaggtgcggcgaaacccattccttttgtagaagatacgtgtgtaccgccacagtatctcgctgattatattgtggaattccggcagctattggatagccatcatcttaattacggtatgtttggtcatgtggatgcgggggtgctgcatgttcggccggcgctggatatgtgtgatcctcagcaagagatactgatgaaacagatttctgatgaaattgtcagtctcaccgcacgttatggtggtttgttgtggggagagcatggtaaaggatttcgagctgaatacagcccggcatttttcggtagcatcttgtatgaagaattacgccgaattaaggctgcctttgacccggataaccgtttgaatccgggcaaaatttgtccgccgatgggggttgatgcccctatgatgaaagtcgatgctgttaagcgaggaacgtatgatcggacaattccgataaatgtcaggaatacattccgtggtgctatggagtgtaatgggaatgggctctgttttaatttcgatgtaaaaagcccgatgtgtccatcaatgaaagtgagtcagcaacgtatccattcaccgaaaggacgcgcgacactggtgcgtgaatggctgcgtcttttaactgaacagggggtagatccgacgttactgaaacagggattagaacaaaaacgaccaagtttgcgtgggttgattgagaagactcacaatagttggcaggcatggcgtggggagtatgacttttctcacgaagtgaaagaggcaatgtcgggttgtctggcatgcaaagcttgctcaacgcagtgcccgattaaaattgatgttccgtcatttcgtgcacgttttcttgagttatatcatggccgctattttcgccctttacgtgatcatattgtggcgagtgcggaaagcagtacaccattaatggctaaggtccctcgggtcttcaatttcttcctgaaacaaccgtggatacaagaattgagtcgccggactatcggcatggtggatttacccttgttatccagcccgacgctgccccaacaactggcgggtcattatgcactttcgaccacactggaacagcttgaaaaaatggaacaggctcatcgtgacgaacatgtgttgattgttcaggacccgttcacgagctattacgatgctaaagttgtggctgattttgcctatttggtagaaaaattgggatataaacccgtattgctgccattttctccaaacggtaaagcacaacatatcaaaggcttcttatcccgttttactaaaacggccaaaaagacgtcagactttctgaaccgggttgcggagttgggtattccaatggtgggtgttgatccagcgctggtgctgtgctaccgggacgaatataaagaaattttgggagaacagcgtggaaagtttgaggttcagcttgttcatgaatggttgattaataccttaccggagaaaagtgaccatgaagaaaaatccggtgataaatggtatctatttggacattgtaccgaagtgactatgctaccgggcagtagtcaacaatggggaaaaattttccatcggttgggtagcaagctggataatatcagtgtaggctgctgtggcatggccggaacctatggtcatgaaaacaaaaacatagaacactctattggtatctataagttatcctggcaacctgccttgcagaaattaccattggagcgttgtttaagctccggttattcctgccgaagtcaggttaagcggatagaagggcaagtacttaagcatccgttgcaagctttattggagataatcccatgatttggaaacgtgatattggactggatagcctgaatcaagtaaatagccaatgtatgatgggccatctgggcataaaaatcacgcatatcggtgatgactatatcgaaggcacaatgccggttgattatcgcacgcgtcaaccatttggtttattgcatggcggggcatctgttgtgctggcagaatcactcggttctttagctgggtatctctgttccgaaggtgagaaaaaagttgttgggctggaaatcaatgctaaccatattcggtcggttcgtagtggtgaagtgaaaggcgtatgtaaacctcttcatattggccgcaatcaccaggtgtggcgaattgatatttttgatgagcggcaacatttgtgctgtacctctcggttaaccacatcagttttgcctggataaaatgaaggtaggttatttaatagaaaaataacctacttattaagtgaaatggttatttatttacgtattaaatttaattgtgataatcctccaagaaatagattttttatagatattattgatgtttttataatattattatttgtacaaattgtgttttcatatatcttataaaattaaatgttaactggaacagaaatggcagattatatgagggggattgatgttggtatagataataatattccacatcatgaaatagtgaggaaaatatatttatgctatccaacacatgtttttcataataatgaagagctacaatatgaaatatttaatcagattagctctaaattttgcataccattttcgtcaatacatgttgttggatctgcaaaaattggtcaaagcatatataaatcttctacgttctctccaggagattctgatttagatattgcgattattagtaatgagttatttattaggtactcggaaattgttttttataaaacaaaaggatttcaagatataagagactttcctcaagatagagagaataatagaagtaaatttgcacaatataaaaattgtatttctaaaggaatatttaggccggatttaatgccgtattgccctgaaaaagaagattggttctcattttttaacaagttgtctcaaagttatagatgcttatttaaatctataaatgctggtatatatcaatcacaatgcttttttgaaattaaacaatctgatataattgaaaaatatagagagggggtaatatgatagattatagagttcgctcagtttctttactaaatttagtgaatgatattcgtagtaaaaaattaatacctgacgcatattttcaaagaaatttggtttggcgagaaaaacataaagtagattttattgatacaatattgtctggttatcctttccctcagatatttatatcgaaagggaaaattgatgtggatagaatgataacagtttcttgtattgttgatggacagcaaagaacaaatgcgataatggaatttattgatgataagtttcctgttaggaataaatattttaatgaattagatggtgatgagaaggctaattttctaaagtatgagatagcagtcattgagcttgatcttgaaaatgacgatcctaaggttaatgatatatttcagagaattaatagaacatcaaattctttgacaaatatagaaaaattagcatctcaatattctacatcagattatatgcttgttgcgaaattattgactgatcagatcgatatatcttggatagaagatggggaagctatgttcaaagaagatccaaatattcctgtagaattctattcttgggcaaaaactaaggaagttaataattttagaaaattaattttagagaaaggtatttatacatcaagcgattttattagaaaagtacatttaattcatatattgaatattatgtcaacgtatttatattcattttttcataggaatgaaaaaacatatgattatttgaatagttattcttatgtgtttgaagaaaaagacgagcttattgataattttgaaaaaacagcttatattatattaaaaatgaaatttactagtaaatcctattggttgaataaagctaatttttttactttattcttgtctattgtaagtaatgttagaaataaaaatattataaatatatccttacttaaggaaaaactgaattatttttcagatcatcttcctgatgattataaattggcggctagtgaggctgttaatgataaaaaagaaagacagttaagggctgtatatatagataaaatagtttctgaatgtgttagctgtcagctttgaactattttttttaaagcggcaaggcttcctaattattatttggctgattgttattttaatccggaggataaattattctccggtatattttaaaccctatcttaaatcatgcctctttatgaactttttgtgcttttattttacgctaataagtaaaatatagcacaattgatcaaactaataatttatagataaaagttaccttttgcggtaattgaattgagttatgataacctttaagaagtatatttatggagcttgtgggtgtttttataatattatgggttgtttgattgtatatgtctgatgaatagaaatggtgaattatcttaaaagaattaatactgtaatagggaaagatctaattgaaaattcttactaaaatctataaatgctgatatacccgttatccttcaagttgcctctttgttggctgcgctcactcaccccggtcacatcgttatcgatgctccaggggattcgctcctttgccgtcgcgatgcatcttgaaatccattgggtatatatcaattaatgctaaagtttcagtgactgtaattatgtttaattccgattaaatatgaagggtgcctgagaaccaagtcataacaacatctaaaagggcgggagtaaaaacctcccgcctaaggttgccttacctgtcgctggattcgtaagccatgattgccgcaacctctgtattacctcgtttgatatggagtttacagattgaaccccttgttatccacgtgaatatgagtaatgtcacacaaataatgatcaaactaaatattgcgattttttgcggcttcatagccttctctccttgctttttgtcaggtaagaggctagccttatgttgctgatacataggagtagcctcatttcgatttatagtcggatggggcttttctctttctgcttgaaacataattcttgcttagaacataatgctcaagacagaaagtctcaagcacccggaggcagtatacttttattcatctaagatgcaagatattgaaaatatttattatagtcacgtaataccttctaattaaattaaccagccagtatagctattaataaagaaaggaaagaatgttgatgatggaatatatagataaaatggtttcttaatgcgtttgattaattgagttgattaaatagaaaatatataataacaacctctattttacatctccggttaacgatgttgcacttattatgtgaatccaagaatgccagagtttcagtagctttaatttatgcttaattccgcttaaatatgaagggtgcctgagaaccaagtcataacaacatctaaaagggcgggagtaaaaacctcccgcctaaggttgccttacctgtcgctggattcgtaagccatgattgccgcaacctctgtattacctcgtttgatatggagtttacagattgaaccccttgttatccacgtgaatatgagtaatgtcacacaaataatgatcaaactaaatattgcgattttttgcggcttcatagccttctctccttgctttttatcaggtaagaggctagccttacgttgctaggcataggggtagcctcatttcgatttatagtcggatggggcttttctctttctgcctgaaacataatgcttaagacagaaagtctcaagcacccggaggcagtatacttttattcatataagatgcaagatcttgaaaatatttattattgtcatgtaataccttcgaattaaattaaccagctaataaagctattaataaagaaaggaaggcgtgttgaaaatggaatatacccgtcatctttcaagctgcctctttgttggctgcactcactcaccccggtcacatcgttatctatgctcccggggattcgttcccttgtcgtcgcgatgcaacttgaaatccatagggtatatatagataaaattgtttcttaatgcgtttaattaattgtctcgattaaatagaaattctatttctatatattatgatcataatgacaatctctattttgcatcttcggctaactatgtcaattttatctggttggctgctattttcatactgggaaaggaactattttcccgtatatctgaaagttcacatcaaatagtgtttctgatgaactttttgtgcttttattttacgctaataagtaaaatatagcacaattgatcaaactaataatttatagataaaacaataaattaaagatataccttcatgtgaaatgaacataaatcatcgtatttgtataaaatttgggctgatcaaggtatatcctcttaaaacaaatggttgaagtgataaaggttatcattaccattatacaggaggagagcactccgataacggcggcaagaatagctatagaataaatgtgaggtcaactatgacaaacagtgttgaaaccttttctctgaatgaaaccgcatggcaaggaatcaccatcaccgcgagagccgcagcgcagatcttaaagttgatgcagcaaaacccacaaagcaaagggttatatctgggggttaagcaatcgggatgtgccggctttggctatgtgtttgagatggttaacgatcccgcacctgatgatctgaggtatgaaaatgaaggtgcatgtttatatgtccctctgaaagcaatgccatttattgatggtacggaagtggatttcgttcgtgaaggtttaaatcagatatttaaattcaataatccaaaagcacaacatgcctgtgggtgtggtgaaagctttggtatataagtgtaccaatatatgtctcagagcaatgtagaaatcagtgatgatgtgcagacttggctcagcgatcatcgctataaagaaggcttctttactcaggtagcgacggatgagctagctaaaggtttgagtgaagatgttgtgcgggctatttccgcaaaacgcaatgagcccgaatggatgcttgaatttcggttggaggcttatcgccattggttaggaatggaagaaccccattggttgaaagcgaattatcctaatcttgattaccaggactacagttactattcagcaccttcatgcggtgcttgtagtgatagttgcaattcacaatctggtgctgttcaagggacagggtcggagcaagctaatagctatttaaccgcggaaattgaagaaacatttgataagttgggtgttcctgtacgggaaggtgaagctgttgcggtagatgctatttttgactccgtctctgtttcaacgacctatcgggataagttagcgaaagaagggattattttctgttcatttagtgaagcgatacaggaatatcccggattggtccgtaaatacctcggcagtgtggttgcaagccacgataatttttttgccgcgttgaatgccgcagtggcttctgatggtacttttgtttatgtgccaaaaggcgtccgatgtccaatggaactgtccacctattttcgtatcaacgcggcgaaaacgggccaatttgagcgtactatcctgattgctgatgaaggcagttatgtcagctatatagaagggtgttctgcaccggtgcgtgatagctatcagcttcatgctgctgttgtcgaagtgattatccataaagatgccgaagtgaaatattccactgtccagaactggttttccggtggtgacagtgctgggggaattctcaactttgtcactaaaagggcattatgtgaaggcgaaaatgccaaaatgtcttggactcaatcggaaacaggttccgcaattacttggaaatatcccagtgtgatcttgaaaggggataattcgattggcgaatttttctccgtggctttgactaacggtactcagcaggcagataccggtaccaaaatgatccacattggccgtaataccaaatcgaccatcatttcaaaaggcatttctgctggccgtagtcagaacagttatcgtgggttggtcaaaatattaccgggagcagaaaacgcccgtaactatacccaatgtgactccatgttgattggtacagaatgtggtgcacatacattcccttatgtggaagtacagaacaatacggcgcaactggagcatgaagcgacaacctcccgcattggtgaggatcaattgttctattgtttgcaacgtggcatcagtgaagatgatgctatttctatgattgttaatgggttctgtaaggatgtgttctctgaacttccccttgaatttgccgttgaggcacaaaaattgctggcgatcagccttgaacacagtgtcggatgagttttccctgtttcccttttttatgacagaacgttaagtcgttcgaaggcatgtaatatgttaagtattaaaaacttacgagtcagtgttgaaggtaatgaaatcctaaaaggattaaatcttgacgttaaaccgggtgaaattcatgccattatggggccgaacggttccggtaaaagtacattatcagcaacgttagctggccgtgaagagtatgaaatcgatgatggtgaaatcacttttaaaggaaaaaatttacttggatttgagccagaggagcgagctggtgaggggattttcctggcgtttcaatatccggtggaaattccgggtgtcagtaatcaatttttcctgcaaaccgcagtgaacgctgtccgccaatatcgccatcaggagccgctggatcgctttgattttgccgattttatcgaagaaaaaattgaattgttagatatgccaccggatttgctgacacgttcagttaatgttggtttttccggtggtgagaaaaaacgtaatgatattctacaaatggccgcgctggagccgacactttgtattctggatgaaacagattcagggctggatattgatgcattgaaaattgtggctaatggtgtgaattctctacgtgatccaaatcgttcattcattattgtgacccattaccaacgtattttggattatgtgaaacctgattttgtgcatgtgctttatcagggaagaataattaaatccggtgatttcagtctggcgaaaaagttggaggagcaaggttatggctggcttattgaccaacagtgaacgaactgaaaaggtgcggcaagttgcagaacgtaaccagcaagcattagcacgttttgctgatttgtaccactgccgtcatggtgaggattcatttcatgccagtttgcattggcagacagccattaaaaccggttttcctcaattcagacatgaagattggcgttatacgccgctggataaattgttaaatcagcaatacagcagcaaaacttgggaattgacagtagcacaatgtgaacagctagcgatttcaatggattgttggcgtgtcgtgatggtgaatggttgtttttcaccgttactgagttcctgtgaatttgggccatatcagctcagtttactggataacaaaagtgggcttcctgcaccgatacaacagggtgagatttttctgcatttgacagagagtttggcccaacagcctttggttattacgttaaaggctgggcaagtggcagaaaagcccctttacctgctgaatataaccagtagtcactgtagtgaagcgttgaatagcagtcattaccgctaccacattgctgtaggcacgaatgcgagcgccagcgtgattgaacatttcgtcagtattgatgggcaacaacctcatatgacaggaggccgattaaccgcggaagtgggggataatgctcatttcacccatataaaactgggggttgagaacagcgcaagctatcactttgcccataacgatattgtgattggtcgtgatgctcaagtaaaaagtaccagctttttattaggctcagggcttggccgacacaataccagcgttaagttgaatggcgaaggggccaatttgtcgttgaacagcttactgttgccgcaaggaaaagaggttgccgatacgcgtacttatttggaacatcataagggacattgtgaaagccgtcagttgcataaaaccattgtgatggatcagagcaaagcggtatttaacggcatgattaaagtggctcctcacgcattgaaaaccgacggacaaatgaccaataacaatttgttgttaggcaaacaagcagaagtggataccaaaccccaactggaaatttacgctgatgatgtgaaatgcagtcatggtgcgactgttggtcggatagatgaagagcaactgttttatctgcaatcacgcggtatcagccgacgcgatgcagagcatatgatggtatttgcttttgctgcggagctgactgaatctattgaagatgaatccctgaaggctattgttatgaaccacattaagcaccgtttagcgagagtggaaagatgactttttctgtaaaaaaggtgcggcaagatttcccggtattaactcaacaggttaatgggcatccactggtttatcttgatagtgctgctagtgctcagaagccggtttcggttattgaacgagaaagtgaattttgtttgcaccagtatgcggcagtgcaccggggaattcataccctgagctctgcggctactcgaatggttgaaaatgtgcgctaccagatagcgcaatttattcatgctcaaagtcatgaagaaattgtcttcgtcaaaggtacgacggaagggattaacctgattgctaacagttatggccgcaagtttatcaataatggcgataatattgttattactgaaatggaacatcacgccaatatcgttccgtggtatatgctggcagaacagattgggtttgaaattagagtatggccattgaatgagaatggcgaattggatcaagcaattttagcttctttgattgattcacggactaaattgctttcttttactcatctctctaatgtgcttggcaccgtgaatcctgtacgtcaaatcataaaacaggcaagaaaactggctgatgagcaggaagggcggttacatattctggtcgatggcgctcaggccattatgcataagcaaattgatgtgcaggatctggattgcgatttctatgttttttccagtcacaaattatatggcccaacaggcattggtgtgctttatgggcgcaaatccctgctggatgctatgccaccttgggaagggggtggcgcgatgataaaacaggtcagcctgcaaaaggggataacctatgcagaaccaccgtggcgatttgaggcgggaaccccaaatattacgggaattattgggcttggtgctgctgtcgattatgtcacttcacttgggctggatgaaattcagcagcatgaacaggcactgatggattatgcaatggcacggctgaaagaggtcaaaaccctgaaattgtatggtcctgagcaacgtcagggggttattgctttcaaccttggccgacatcatgcttatgatgtgggaagtttcctcgaccaatatgggatagcgatccgtaccgggcatcattgtgcccttcctgtgatggaacattatcacgtttccagtatgtgtagggcctcattggcgatttatactacgcaagaagatattgatgcacttgttgttgcattgcaacgaatagaacagttactgggttgagtaaggtatagctcgaaagagtgataaggaaaaagtcatggcaagtttgcccgacacaaataagttgttacgtaatttttcccgttgccggaattgggaagaaagatatctctatatgattgaactgggggcgaagttgcctcctcttactgacgaacaacgccaacctgagaacttaatcgcaggttgccagagccaggtgtggatattactgagaatgaatcaccaaaacaaagtggaatttattggtgatagtgatgctgcgattgttaaaggattggttgcgattgtctttattctgtttcaaggtaaaacaacccaggagattctggatttggatgtgactgaatattttggaaaattgtctttggagcaacatctgacaccctcacgcacgcaggggctgcacgcgatgatacatgccatccgaaataggacaagtaaaatggtttagttgccagtcttacgcgtttcttcagctactgataatatgtacggccaacaaagaggcaacttgaaagatgacgggtataaatttattcaataacattcagaagtcattccaggaagcaagcatgaaacgagttttaacgtttattggcgtgttattgttcagtgggctaactaacacagtcagtgccacagaatatactttgccagcggccaatagtcgtttaattggcgaaaatacgacattggttgtacccgatgatggacgttctttagaggccattgctgctgaatataaaattggtttactggcaatgctggaagctaatccaggtaccgacccttatttgcctgctcagggttctgaactgattattccatcacaaatgttgttgcctgatacaccgaggcagggaattgtgattaaccttgcagaacttagactctactattttcctaaaggaaaaaacaacgtcatcgtgtatcccattggtattgggcaactcggtcgtaatacgccagtgatgacaacatctgtgagtcagctaattaaagatccaacttggacgccgactaagaatatccgtaaacattatgctgaacagggggttattttacctgcggttgttcctgctggtccggaaaacccaatgggcgcatttgcgttgcgcttagcagccgggcgtggagaatacttgatccacggcacgaatgctgattttggtatcggtatgcgggtgagttccggttgtatccgtttacgtcctgatgatattgaaacgttattcaacgccgttcctcgtggaacacgagtacagattatcaatgaagcggttaagtattctgtagaaccaagtggtaagcgttatattgaagtacatcagccattgtctaaaaaagaggatgataatccacagacattacctattgtccgctcagccgatttgaacaagttcattgataataacaagacagataagaatattgttgaacaagcgatggtacgtcgttctggtatgccagtgctggtaagtaaaggtatagagcctgaaacacaacaggatttaccagaagagaatccagaagagaatatcgtgccgatggaagatgatgttaaaggtgcagaacaggcagtgaataacgatgtatctgaatcgtttaaattaccgccgttatatcagcctgggccaatctatcgggaaaattaatattttattgcggacaaggaagtcagcgaatatttacctgacagaatctgatgataaaaaaatggcacacagatggactgtgtgccatttttgtacataattacaaaaaattattttttgtaggaacgaacttgattatccagacgctgattcgcacgagctgcatcgtctttagcggcttgaacgtcagtatgtactgcgttcacgtcattgctcagttgatcaacttttgcattcagagtctgaatatcagaagtcagttggtcaaccttagcagtgcttgaacaaccagccaacagagtagaagccagaactactgcacccagtacaattttagtacgattcattataataccctctagatttaagttaatctccaagtagccatgtaagtattacacaaagttttttagaaagagaataaatttttatcatgaaaaccaattatttcaatttttctctttagtgagcggataattttcatctaaatgtaaaaaaacaaaaccgttgagtaacattttaatcaaaaaaagcctattccatgagggaatgatattcttcgaaataattttagttaaaaattcttataaataagaaatacaacatccaggtcatcttacctctattgaactatcggagtatctcatttatgaagctatttttttatacataaatttagggtttctcttaaaacaaatttgttaagtaaatcttattgtagatgaataacttgacaatgttcaggttgaatcctaggctcaaattcaaactggtaagaggagtttgttatgttaagtgatcaatctaacgaatattttaacatcagcattgacaacggagtcgctcatttacaactcagtcgtcccgaaaaggcaaatagtttggcgcttgggttttggaaacggtttcctgaaacagtagaacaactcagtcgttcaggtgaagtgcgggcaatggtgatatctgcacagggaaacacattttgtggtgggcttgacttgcaaatctttgcctctagcaaagaggctaatacggctaatcctaatgagcgggaagcgatgcagttcagcttattgcaaatgcaagaggcgataagcgtattggaacatgcccgattccccattattgccgcagtacaaggcgcttgtcttggtgcaggttttgatttaattgctgcgtgcgatttttgttttgctgctgaaaatgcgaagtttcgtatagaagaaaccaatattggtatgatggctgacttaggtattcttcaacgtttgcaacatttgatcccaagtggtatagctcgctatctcgcgctaactggggatacgttgagtgcggttcaggctcatgatttggggctggtggtaaaagtgttcccttctacggaaacactaatcgaaggtgctctcgcgactgcccggcgtattgctgatcggccaccaattgctattaacggggttaaacgagccatgctttacagccgtgatcatggtgtttacgaatcattgcaacaaatagcacttttgcaagcttcgatttttagccgtcaagatatcctgtgctcgattcaagcgaaagcgaccggaacaaaaagtgagttccaaaatttaagtgaagtcggtaaagctttcgatgagccatgattaagacaaagatattgatgatatgtaaagtggattctccacaaataatgtagtgctggaaaatgccatcattgttgagagttaagccattttctgaccgcgagaaaacagagaatggcattattattaatcttaacgggtataatatgacgattgggaaagtaatttggtattggcggagaaaaccagatattcaatatcctgaaacaccgccatatttacggtgtttcagaaataaagcgacttattaaattaaaggacgtgaacagacgacgtgttggttgtgccgcttggaaccagggcaccagataccataaccacgatttcacctttcttcgctaggccacttgctagcgccgcttctttaccaatgcggtagaaatcgtcggtagaggcgatttctttaacaatttgggtaaaaacacccttaacaagcagtaattggcgggcagtcacttcattagtcgttaatgccagaatgggcgcgtcagggaaatacttacgaatggatttggcagatttaccgccataggttgcgaccacaatcagaggggcttccagtttttctgctgtttcaacggcaccacgacacaccgcttcggtcacgcgcaggttacggcaatggacggcttcgatacggcttggcataacgcggtctgtacgttcacaaatcgttgccatgatagtcactgcttctattggatatttgccttttgcactttcgccagaaagcataactgcatcagtaccatccaaaatagcgttagcgacgtcaccggcttccgcacgggtagggcgcgggtttttaatcatagaatcgagcatttgagttgcagtgataacaactttgcgagcgatattacatttttgaatcatcatcttctgggcgaagatcacttcttcaaccggaatttcaacgccaagatcaccacgagcaaccatgatcccgtcagaagcttccagaatttcatcaaaattgttcagaccttcctgattttcaatcttagagatgatttgaatgttttcaccgccgtgcgctttcagatgttcacggatttccagaacatcggagcgcttgcggataaaagaagcggcgacgaaatcaacaccttgttggcaaccaaagatcaaatcttgcttatctttttcagccagggcaggcaggctgatggaaatacccggcagattaacacctttattttcccccaaatcaccgttattcaaaacttggcaaataacctctgacttagtgacttctttaactgtcatgccgatcaagccgtcatcaactagcacggtattaccgggagccagatccgcggggaaaccgcggtaagtgacagcaacacggtctttattaccgataacggaagtgtcagtggtaaaagtgaaggtctgacctgcggttagagagacatcgttaccgccttccagcttcatagttcgaatttcagggcctttagtatccagcaaaatagcggcttgtttacctgtcttagtcataactgaatggatattttgaatacgctggccgtgctcttcatagtctccgtgtgaaaagttgaggcgcataacattcatgccggcattcaacagttcggccagtttttcttcggattctgtttttggtccgatagtacaaacaattttggtttttttcatgacaatctatctacaggttttaattggataaaatagtgagtcgccaactttatggtttgcgcagataccatgtggtgttgaacgttgcgcaacatcattaaggacaagtggcgtggaagacatgcggtgcttttcgtgtgaggttaggcacatgtaattatgcgagcttatatacccgttatctttcaagttgcctctttgttggctgtactcactcacctcggtcacatagttacctatgtgaccggggattcgcgatgcatcttgaaatccatagggtatacatacgattaatctgtaacttttcagtgttcggcaaatcaataagctgaaaccattcaaccctaaatttcgccgtattatagagacttatttctgtgaaatgaatcgaaaaatgattatatgaattaattataacggtaaactggaaaaatgacgcagatcttaacagaggagagttattgctcattgcgcaaactgtttgtaaacaaacaacagtctattttgacgtgggaaataaattaagcacaaccaagagaaaagataataaaaacaggaagatttatttgtagacttggtgcgtccgagtggactcgaaccaccgacccccaccatgtcaaggtggtgctctaaccaactgagctacggacgcactataacccggtgtaatcaatacaaaccggtgtaatcactatgcaattggtgcgtccgagtggactcgaaccaccgacccccaccatgtcaaggtggtgctctaaccaactgagctacggacgcaatctaaattgcattggtgacaacggggacgaatattaacggcgagttagccttctggcaaggggaataacacaaattattgttcaactgttcgtatttgcatctgttacagtgagtttgtcgtttattccaccagttaagtattcatccccggctttagagtaaagtaaattagtgggttgaatgttgtaaaattacctcatctggttgtttttgtgtccatgaaatacgagcaaatatcatcactgctgatgcagtcaggccaataataaagccgatccagaacccttgtggccccatcgcgggtacaatatagtcggttaatcccaggatataaccgcttggtagccccagaatccagaaagcgataaaagtgatataaaagatagaacgcgtatctttatatccacgtaaaacgccagcccctaccacttgtatggcatcagataattggtaaagcgcggcaaatagcatcagatgtgatgccatggtgataacttcaggattgtcgttatacatcaaggcgatcggctctcgcagaataatagaaaaggttgcggttaaacaagcaaataccaaaccaaccataattccggtataggctgatatccgggcattctcgatagattttttccctaaattatagccaacacgaatagtggttgctgcggccaaagatattgggaacataaacattaatgaactaaaattttgggcaatttggtgccctgcaacagcagtaacgcctaaaggagagatcaataatgccactatggcaaataacgtaatttcgaaaaataccgccatcgcaataggcaagccgagggctgaaatgcgtttcaaaatatgccattctggtgcggcaaagcgatgtttagggcggatatccctctgtgatgatgcacgtttcacataccaacgcattagcaggaacatgacccagtaaacgctggcggtagcaacaccacagccgacaccacctaaagcgggcgcgccaaatttaccataaatgaatatgtagttaatcggaatattaatcaataatcctaaaaaactaatcaccatgcctggtttggttttcgataaaccttcacattgattacgcagtacctgataaaacagatagcccggcgcaccccacattattgcgtggataaatccaacggctttttctgccaaaattggatctatattgtgttgcctgtcaatcaggaacttgctgttgtatagaatagcaataatgataatggagagaaaaatcgctagccagaacccttgctgagtttggctagcaatgagattcctgcgaccagaaccgttcatttgcgcaataatgggggttaaagctaatagtaagccgtaaccaaataagataactggcagccagatcgaggtgccaacagcaaccgcggacatatctgttgcactgacgctacccgccataacggtgtccacaacccccattgcagtttgtgaaaattgagcaataatgacgggaatccccagagcgagcaaactacgcgcttcttttaaatacttctgcacgcattacaccttttttattgaaagtagaaaatattaagaaagatatctgtatataagaaacgatttttgaaaaatcaaccgcttactaaccggagtattgtatctatttaataccatattacaacaataatgctgagtttatattcaaatgatcaggtggtatttatcaatgacaacttgatataaactaattaataattatacacaatcattaagaggttcttctatgttcacgggcattgttcagggaaaagcacccttggttgctattgatgaaaaaagtaattttcggactcatgttgttaaattcccggctgaattattgccaggtattgaaacaggggcgtcagttgccaataacggttgttgtctgacggtaaccaaaatagaaggcgatgagattagtttcgacttgatgaaagagactctacgtctgactaatcttggtgatttacagctaggggattatgtgaacctggagcgggcggctaaatttggggatgaaattggtggacatttgatgtccggtcatatcatcacggttgctgagatagctaaaattttcacttcagaaaataatcatcaaatatggttccgtatccatgataagcaattaatgaaatatatcttacataaaggatttatcggcatcgacggaatcagcctgacaattggcgatgttgttaataatcgtttttgcgttcaccttattcctgaaacactggaacgtacgacattaggtaaaaaacgtcttggtcagagggttaatatcgagattgattcacaaactcaagcgattgttgatactgtggagcgtgttcttgctcagaaagagcgggaacgggttgcctctcagcaaccggagacattgatggaagaatgcgcaataaatgaggagcgatagggggaccccgattttcgctttcgaacagaattaaccgtgtgctaaaagggagcattgaacccatcgatgctcctttttgtgatttatattgcagtgttttgcatgtaatgttaactaatatagttaatattgttattattgtgttaatgcgttttctcgtaaagcgcaggttaatccccgtgatgatatttttagaggttacttttttatggaaaacccgattgagttagatgaatggcttgaagaacctacacatgatgatgctgttgaaatgatgaatgcacaagctgtcgtaccttttggtaccgcactttggccttaacggttttttataattaaggttctttataatactatataagtaaggggagtcaccccttacttaaaaataaacaggattgtcctcatggataaaagtcttgaaaatatgtattgttgtttatcacatcatcccgcaatttcggataaagtaagaaatggtgaatgtataaaaatatttatcggatctgatactgagcatagcgatattgcgcagaagatgtatatgtataagaagaatttcgatgtaaagtctgattttgcttttttagaaaaaacatcaccggacgatataaaacaaaaaatatctgattgtgatttgtttatttttctttacgcatcatcaacattaaagaatgcatctccacaagggccagaatatctaaccaaaataagaagctttattactgaatcatggaagaaatctgtattgtttaaagattatggcccacatttcattgaagcatttagcgagccaccagcatcaataacagaaaggaacaaaaaacttattgaattatcaaatcgatcacagaagattcaatatacagataataaagggaactcaattgtaggttatttagaaaaagaccataagtggacttccattgatggcagtggaaatcttgatgttattcctggggaaatagcaagccatataaagcgccttaacggtagtgtcagctttagtggcacttttttgagtacggcaccctttgccataaagtatggggttgtcaatgatatgatgactataaatataaaagagggtgaaattattggatttgattgtgaacatgatgaatttagtcgggattttaatttatacctaaaccataatcacggaaaccgaattgttgaagagtttggtattgggactaacaggggtgtgaaagcgctttatggcagaaatgctggttttgaagaacgacatcctggtttacatcttggtttgggtggtggtgtaaaagggagtcatcatttagatttgatattttctggtggaaaaatagcatttgatcaaacggtcttctttgataatggttatgtgaatgatttccgttagtggaaaacagagcgatctttttaaaattagagttaaacatggatatgtttgttgtattgactaaaagctacagtggaaacctgtagcttttataccctatggatttcaagatggatcgcgacggcaagggagtgtagccaacaaaagaggtaacttgaaagatgacggatatataccctatggatttcaagatgcatcgcgacggcaagggagcgaatccccgggagcatagagaactatgtgaccggggtgagtgagtgcagccaacaaagaggtaacttgaaagatgacgggtatagttaattatcgggctactcgtaacccaccttcaataccttttagactgaatataatttgccacaattggatatcgcgagcacgaaatgcacctgcacaggcgttcagataatagctaaacatgcgtttaaatgttggactatagttattttctatttcaggccagcaggtaataaatctttcatgccaggccatcaatgtgcggtcataatctgcgctaaagttatgccaatcttccataacaaaacggcttttactggtgtgggctatttgctcaatagaaggcaggcagccattaggaaaaatatatttgctgatccacgggtcagcactggttttagttttgttggaaccagcggtatgtagcaggaataagccatcaggtttcaggtttcgttgaacaacgtcgaagtaagtcgcataatttttaggtccaacgtgttcaaacataccgacagaaacaattttgtcgaactgttcatgtaaatcccgataatctttcagaatgatttttacatccagatttgtacattgtttctgtgcatatttctgttgttcggctgaaatagtgatacctgtgacggaaacaccataatttttagccgcataagctgatagcccaccccaaccacagccaatatccaacagagtcatacctggagaaagcgccaatttctcacagatgagtttcaacttatcaagctgagcctgttccagtgttttagcttgtttccagtatccgcaggaatattgcatataagggtcaagcatatgggtaaaaagatcattgcctaaatcataatgttgatgaccgacaatccatgatcgttttggcgtttgcagattacgtaagcgggttattgcgattctcactatatctttgagattattgggcattttattttctaatccggcgcgtaaaacgcgataaaagaaaatatccaaccgttcacaatcccaccagccatccatataactttcacctaatcccatcgaaccttgttgtaaaactcttttatagaaattagcgttttttatctggatatcataagggttgtgaccattaatttgaacacctgcttcttctagcatctcattggtcattctctgccaggagttaatggctgttttcgggtttttaatacaagatgaactcatatactctccaacgttagggtgatggaatactgaggagctcgttttagctagcaaagcaggatgctaagacgcaaaatgcaaaaaataacaaagaatcaaagtaaaaaaccttaaagatgactaatccatgagtttaatggggcagtcattgctcctgaaaacctcaaattccaggttataccttatagatttcaagatgcatcgcgacggcaagggagcgaatccccgggagcataggtaactatgtgaccggggtgagtgagtgcagccaacaaagaggcaacttgaaagatgacgggtatatttataatagggaatgtattgagtataaaagcgtaaaattgttttatcaattaataaataaaggctgcgattaattgataattagcagcctttattgagataataatctgattaatatcaggaattttgttcaactgtttgaatgcagcgatcagcgttttttttccactgtataaaatatcctaatgccattggaacaacggtagaaaccataacagtggttgtggatataagtggattgttgataaatgctgatacaatcagactggcaataaaacagagtcctaattgaagcgtgttttgtaatgcagtggcttttccactgtcttgtggataagcggataaagcgtttgctactgcaattgggtataacgcgccattcattgcagccataaagcaaaaaggtaccagaatagtgaatagcgttggctcgtcaaattttgcaattaaatagagcacaatcatactgatagcatagccaattaacagataagggaaaataatatcactttttattttggctaaaatactgcggcatccataacctccaacgataaaggctagcgtttgaggaatataactcagaccaatgtcgtccggggtatatcccatctcaccgagaattgaaggtgagcctgttaaccaggcaaaaaagccggcgctgcatgatgcaaatatcagaacattgccactaaatagcggtgattttaatagcgtaaggaaagagacattatttgtttgcacttgagtttcacggttgttgcgattttcttgcaagaacagagtaaaaaacaacagtaataatgtaattgccagtaagactaggaaaattatgcgccagccgccatgttgtaacagccaggctcccatcaaaggtgccaaggcaggggagagcgcaaccagaggcataatcgttgcaaaaacacgtttggtacgattggcttcataacgatcaataactaatgcttgccatgagacggcggctgaacaaacacctacggcttggataaaacgcaaaactaaaagttgggtggcgtctgttacccacatcatacccagacagccaatagaaaacagggatagcccggtgatgataatcggctttcggccaaagcgatctgaaagaggtccccacaaaagttgagcgaaggcgaaacctgcaagaaagatgcttaggctggcactgattgcttctgccgatgtcgctaattcttgttgcatagtgccgaatgctggcagatacatatcaatggccagataacctagcatactcaagcctgcaaggtagaacatgaactgacttgagtttttcatttgattactctctttgaatatcatgattgaaataatttgcagtgatatacccgtttctttcaagttgtctctttgttggctgcactcgctcaccccggtcacatagtttgctatgctcccggggatttgctcccttgccgtcgcgatgcaccttgaaatccatagggtataggtagataacaatattgacacatattctatatgtcgtgatttttacttgtgaaatggtaatatttgcatagtgctgtgaaaaaaattgaaaggtaaaattatgtggtcagaatattcacttgaagttgtggatgcggttgccagaacaggcagttttagtgcggctgcattggagcttcatcgtgtcccttctgcgatcagttataccgtaagacaactggaagagtggcttgctgtttcgttgtttgagcgtcgtcatcgggatgtagaattaactgaggcaggcgctatgtttatcaaggaggctcgctctgttatcaaaaaaatgattgatactcgtcatcagtgtcaacaaattgcaaacggctggagagggcaatttagtattgctattgatctcgttgtcaaaccagagcgtagtcgccagcttattcttgatttctaccaccattttcctgatatagaactttttattcatcaggaagtgtttaatggtgtgtgggacgcgctggtgaatagtcgagttgatgttgcaattggtgcaacccgggtagctccagtcggggaaaggtatagtttccgagatatggggtttatgccttggctatgtgtggttagcgctgaccatgcgctgactcagttgccgggtctgttatctgatgaccaaatgcggccttatcccagtttgtgccttgaagatacatcccgtaatttaccgaagcgtgacacctggaatctggataatcagcgccggttggtggttcctgattgggaatccggtttgtcttgtctaaacgagggattatgtgtgggaatggtgcctaaacatagggcaatgccgcttattcggcagaataaactcgccgtgctggaattggaacagcctttaccagacagtccatgttgtttggcatgggttcaaaacagccattctccagcattaagttggctgcttgactatcttggcgatagtgaaactcttaatgctgaatggcttcaagatgaataaaacggattaacgacgatagtcgacaaatggaccatccacgacagaacgtcgctcaaccaagcgtggatgtacttcaatagtttgtgcatcttcacgtttattgattattctgtccagtaacatggaaaacgccatctgccccagtcgttcttttggctgatgaatggtggtcaatgccggagagaaataacgagcgttgcgtatattgtcataaccgatgacagaaatatcctgtgggacgcgcagtcctaattcatcagcagcacaaatcgcccccatagccataacatctccgccgcagaaaaccgcagtcgggcgctgtttttgattcaagatttgatgcatggctttatagcccgattctggttcaaaatccccctgaataacccactcttctttgatcggaatgttggcttcttttaacgcctttaagaatccttgatgacggccaccgccggtatttcgtgccagagggccggggatcgcaccaatatcacgatgaccacgttcgataagataacgaccagccagataaccgccgtggaatgcattatcaataatcgtatcggtgaaatcacttctggcctgtccccaatccatgacgaccattggaatattgcgataatcttccaacattcccaatagctgttccgggtattctgaacacataattagcagtccatccacacgtttttgggccagcatggcgagataggctttctgtttatcaatgttattgtgtgagttacataaaatcagcgtatagcctttgctataacaactgttttcaacagactcaatgatttcagcaaaatagggggcttcactggacgttgccagtaatccgatcgattttgtgtggttaactttcagactgcgagcaacggcactgggtgaataattcagtgccttaatagcagcccaaacagcagctttagtatcttcagcgacgaagcgggttttattaataacatgggatacagtagtggttgagacgccagcgtgcttagccacatctttgatcgttgccatgaggtgaaagactcctgaccttttggtctaaatttaaaacgctttgttaatcgcttgctaaccctttacatcaaggggctagcaataagttagcgataaattctggattttgtctgatctggctcaaaagtgaaagcaataatcagtgttataaaatgggtggtaatcgctatttatgcttttccttatgtaagggcaattaaccatctcaatagattggtttttgtcactataaactttttattctgaggaggctctatgaataccgatttgaagcttggtttatttactgctgtcagcacgttggtgatgattgccatttttgccgctctttgcttgatctttgcctgatgttttgaacgggctagatgatttaaaaattgggcagatagtttctttatctgctctttgtctttctgccaccgcttttaacaacctctacgataaataaccgtgaaaatgatgtcatctgtgtcaggatacgaagagatcaggatacatattagtgagagaaaatggtattctccgcaatatcgtgacgatgttggttatcaacgggctgttggtttaaaggaaataaaaatgacgactactattgagaagattgagcgccaaattaaagaaaacccgattttattgtatatgaaaggttctcctaaattgccaaattgtggcttttctgcgcaggcggttcaggctttatctgcgtgtggtgaacgttttgcttacgtagatattttgcaaaatccagatattcgtgcagagttgccaaaatatgctaattggccaacttttcctcagctttgggtggaaggtgagttgataggtggatgcgatattatcattgaaatgtatcagcgtggtgagctacaaacattaatcaaagaaactgctgataaatgtcgttctcagggcgaaaacgcgacagagtaattttttaattacttacagattatacccaatggatttcaagatgcatcgcgacggcaagagagtgaatccccgggagcatagcaaactatgtgaccggggtgagcgagcgcagccaacaaagaggcaacttgaaggataacgggtatattatgctatccccccatatgttgatatatggggggattattgtttagatttgattatattaatctagccgttcagctatttatccagttttttctgctgttgttgttaatggccagccaccaagttgtttccaacggttgaccatttcacagaataattcagcggtacgatcagtatcatataacgcgctgtgagcctgattattatcgaatgggataccggctgtgatgcaggcttttgctaagattgtttgtcctaataccagaccacctaaagcagcggtgtcaaaagttgcaaacggatgaaacggatttcgttttagtccggtgcgttctgtggcagccataacaaagctgtgatcgaagttagcattgtgagcaacgataattgcccgattacaatgattattttttatccctttacgaaccattttaaaaatagcgtgcagagcttcatattcgctcaccgctccacgtagcggatttaatggatcaatgccggtgaattccagggctgctggttcaaggttggctccttcaaatggctcaatatggaagtgaagtgattcgccaggcgtaagccaaccttcaccatccatttccagtgtaacggcggcaatttcaagtaatgcatctgttttggcattaaaaccgccagtttcaacatcaataacaacagggtaataacctctaaaacgtccactaaggacgtttggcgcttttttgtcagacatcagattgagttacccagagcgttgctggcatttttgttttcaataagttcaattttgtagccatctggatcttcaacgaaagcaataatggttgttccgccttttacaggacccgcttcacgggtaatgctaccacctgctttgtgaatagattcgcaagtggctgcgacatcatcaacacctaatgcgatgtgaccaaaggcattccccatttcataatggtcaactccccaattataggtcaactcgattactgctccttcgctttcatcagcgtagccaacgaaggcgagtgagtatttatattcggtgttttcactggtgcgcaacaggcgcatgcctaacacttcagtgtaaaaattaatggagcgttgtagatcaccaacacggatcatggtatggagtaaacgcataattacctctaatttaatggttttaccaatatttttgtgcggcagatcgcacaaaaaccactaactataacgtgtcttacggttacagttcaatttgtccataattataatttattcttatctaggtttataattaaatatagtatgtggattgtataggaaacgggatgtgatggctgagcaactcgaattttttgctattcctagcccttgtcgaggaatttgtcaggcgaatgagcggggcttttgtctggggtgttatcgcagccgggaagaaagatttaattggatgaaaatgtcagatgggcaaaagcgtgaagtattgcgactgtgccggcaaagatatttacgtgtattgagagcagaaaatcagacagatgaagaaccacctgaacagccatcactgttttaattatcgatttttgaggttattggaattaacaatccaatgatttacttatatagggttatatttttggcaaaattataaatgttctactataattttaagtattttgtttgttatttttttattttttgattaacggaaaggctaagtgagcttatttgaatttctttataaccttatgttttaaatggaattttaagcttgattgcgtgataaatgtaaaataaaaacaacattaatgtaaaaatagatagcttagcatttagatgacagctattcttatagtactttgaataaagtattgaatgatatttattggtttctgcttgcttgtattcatagttctgatagtttttatggtaaaaatattgtatgttaattgttttgttctgagtttaaattaagtttagttgttcttggttatagttacctgaattagttagttactaagaatttactgtgattatacagaagttatatatacttttttaaggctagttttagcctgatttagaaaaatttggctgttatgtttagtaggctagttatttaaggagggacaattggaatctacattgggatcagatctggcacggttagttcgtatttggcgtgctttaattgactaccgtttaaagccgttagaattaactcagactcattgggtaacgttatacaatattagccggttacctcaggagcaatctcagatacagttggcgaaagctatcggtatcgagcaaccatctttagtcaggacattagatcagcttgaggaaaaaaaacttatcacccggcatacttgtgccaatgatcgtcgtgcaaagagaatcaagctaactgaagattctgcatcggttattagggagttagatggtgttattgaatccacaagaaatgagattctgggaggtatttcacgcgaggaacttgcttttctttccactttagttcagaagttagagcaaaatattatccaattacaaagtagatagtaattacgatatccatgaaatgctaaccggatgaaagaagaccgcgacttactagaatgaagtcacggttttcttatctatatcttattgtcgaggtgaaacagtaatattactaccttggcctgcgattcttacacgttggcctttatgaaaggctgttttgccttgtttttgaacaacaatgatgctttcaccactgtcacgacgaatttcgagttctacacctttagttgtgttaagagctccctgaacattttggcccgcgacaccaccggcaattgcaccagcggcagtggctaatgtgttgccactgccaccaccaatagtattaccaacaagtcctcctagaactgcaccaccaatcgcgcctaatacattctcattgctgcccgcctgaatattgataggacgaacagaaacaactgtgccgtaagagacggtttggacctgcttagcttgtccagcagtgtaggtatcaccagaaagagaatcggtgttgacacagcctgataatgaagcaacggcaaccgcgctaactaaaaagtgcttaaacatagtaactcctaatttcgatgcctgactgcggaaatctgatagctcactgggcaatcaggctaacaaccggcattggcaataagtaataaaaagtttattcaaatagaatatcagtacattagcaatctagtgctaaacgtatattaaacgtcaatagagatttttaaaagaaatagctattaatgaaaaattcagcattttttgtgaagttgtttccaaaaatcaggttttattccttcgtttgtctattagtcatatacagccaaaactactgcgctttatagttattggcatggtttctgattttatcgagacagattctaagcaggaaggcaaattaaatggttatgaagtcaggtcgttatattggtgtaatgtcgggtacaagtctggatggcgttgatgtggtgcttgccgcaatcaatgataaagttgttgctcagcaagccagttattcgcatccattcccatacgaattaaaacagaaaattctcgcagtctgtcaagggcagcaaacgacattatcggcaatcggtcggttggattatgaacttggttctttattcgctgaagctgtacaaggcttactgattaaaacagggttaaccgcgagtgacattactgctgtgggatgtcatgggcaaaccgtttggcatgagccaaatagtcatacgcctttcacgatgcaacttggcgacaataaccgtattgccgctttgactgggataactgtggttggtgattttcgtcggagggatatggcatatggtgggcagggcgcgccattagttccagcttttcatttcgccgtattaggccatctgacagaacgaaggataattctcaatatcggtggtattgccaatataacgacgctattacctggatcacctgtcaaagggtatgacacaggtccgggtaatatgctgatggatagttgggtatggcgtcatcagaaaaaaccttatgataaagatgcgcaatgggcgcgagaaggtgttgttaataacaaattgcttgggcaaatgctttctgatcactatttttcacgaccagctcctaaaagcacaggccgcgagtatttcaatatgagttggttggaggcgcaattagttaattttcctgacataccacctgtcgatgttcaggcaacgctggccgagctgacagcagcgtctgtatcacagcaaattatgttgagtggtggatgtgaacgtctgctggtttgtggtggtggcgcacataacccgcagataatgagccgactttctgccttattaccggggacggaggtttgcccgacagataaatatggcctaagcggtgatgatatggaagcactggcatttgcttggttagcattccgtacaatgtcaggtgcgccagggaatttaccctctgttactggtgcgagtactgaaactattttaggggcgatttatcctgttattaatcaataacaatgataagctatcgggtatttagtgagtcataaacagagctacgttaatgtcagaacataacgaatttgatgttgcagaattacgccgtgaatatattcgtggtgggttaagacgtaaggatttgactgaagaacccatcgagctttttgagcgttggctcaatcaagcatgtaacgctaagttgagtgatccaacggcaatgtctatagcgacggtcgatgagaatggtcaaccgtatcaacgtattgtgttattgaagcattttgattcaaatagtctgattttttatacaaatttaggcagccggaaagcaaaacatttggcgcacaataacaaaatcagcctccatttcccttggtatcctctggaaaggcaagtctcttttcttggtaaagcggaacgtctttctcctgttgaagtggtgaaatatttccatagtcgtcctagggatagccagattgctgcatgggcatcacaacaatcttcccgtatttccgcacgtggtgttttagaagggaagttccttgaattgaaacagaaattcttgaatggtgaagtgcctttacctagcttctggggaggattcaaagtgacctttgattctgttgagttttggcaaggtggtgcaaaccggctccatgatcgttttatttatcaacggcaaggcgatagctggcatgttgacaggcttgcaccataaatcgtggattatcatttttaatactagcacttatagtattggcgttttatcctatgccgcactcttttataagtagcgacttatacaacagacaaaatacacaaattgatggagtcattaatgtctagcaataacctgataaaacaactgcaagagcggggcctcattgcccaggtgacggatgagaatgcgttagcggagagactggcgcagggccctgtctccctctattgtggtttcgatccgaccgctgacagcttgcatttggggcatctggttcccttgctgtgtttaaaacgattccagctagccgggcataaacccgtggcgttagttggtggagctacggggctgattggtgatccaagttttaaagccactgaacgtaaattgaatactgaagctaccgttaaagagtgggtggagaaaattcgtagacaggtttcacctttcctcgattttgattgtggcgaaaatagcgctaaaacagccaataattatgattggtttggcaacatggatgttctggctttcctgcgtgatatcggcaaacatttctcagttaatcaaatgattaataaagaggcggttaaacagcgtttgaaccgtgatgatgtgggtatctctttcactgaattttcttacaatctcctgcaatcctatgactttgctcgcctgaatgaagtccatggtgttgagttacagattggtggttctgaccagtgggggaatattacttctggtattgatttaactcgtcgtatcacccagaaacaagtatttggtatgaccgttccactgatcacgaaatctgatggcactaaatttggtaagacagaaggtggcgctgtttggttagatccgaagaaaaccagtccatacaaattctatcaattctggattaacactgcggatgcggatgtttatcgcttcctgaaattctttacttttatgaatcttgaagatattgatgctttggaagaagaggataaaaatagcggtaaagctcctcgtgctcagtacgtgttggcagaacaagtcactggtatggtgcatggtgaagaggggttagcagccgctaaacggattacagaaagtttattctctggcgctgctgctgatttgaccgaagcggattttgctcaattggcacaggatggtatgccggtaattgagttggaaaaaggtgcagatttgcaacaagctttggttaatgccgggttggtaccttctcgtggtcaggcgcgtacgatgatcagttccaacgctgttgcaattaatggtgaaaaacaatctgaacctgaatatctgtttactgacagtaaccgtctgtttgatcgttacaccctgctgcgtcgtggtaaaaaacacgattgtttgatctgctggaaataaccaaggttgcatatataccctatagatttcaagatgcatcgcgacagcaagggcgtggatctaataaagaggcaacttgaaggataacgggtatgatggggcaacaataatgttgcccattttcttacataccctattgatttcaagatgcatcgcggcggcaagggagcgaatccccgggagcatagaaaactatgtgaccggggtgggtgagtgcagtcaacaaagaggcaacttgaaagatgacgggtatattcttactgtgactttaatcttataaatagaaaccaaaataaaaatataggccgtcattgtgaaaaatattctttcaattcaatctcatgttgtttttggtcacgctggtaacagcgctgcggaattccctatgcgtcggatgggggtaaacgtatggccgttgaacacagtacagttttcaaatcacacccaatatgctcaatggaaagggtgtgttatgccggctaaccatcttactgaaatcgttcagggcattgaagaaattgaacagctcaaatcttgtcatgcagtactgagtggatatatcggttcagcggagcaagggggccatattatcgacatagtaaaacgggtaaaagcggtgaatcccgatgcttggtatttctgtgatcccgttatggggcacccagaaaaaggttgtattgttgtgcctggggtggctgaatttttgtgtaaagatgcacttcctgtaagtgatatcattgcgccaaatttgctggagcttgaaacactcagtatgcagaaagtgactaatgtagaacaggctgttatggctgctcggacactatgtgataaagggccggatattgtactggttaaacaccttagtcgcgcgggttatcggactgatcgttttgaaatgctattagtgactaaagaacatagctggcatgtgagtcggcctttggtggactttggcgaacggcagccagtgggtgttggtgatttaaccagcggcttgttattggttaatctattaaaaggtgagtctttacaaaccgccctcgaacatgtcgctgctgcggtttatgaagtgatggtaacaaccaaagagatgggcgaatacgaactacagattgtggctgctcaggacagaatggtggcacctaatcataaattttgggcaatacagttagattaatacccaatggatttcaagatgcatcttgaaagatgacgggtaaagatatttaaccgttccactgatattgtgtggaacggttcttttatctgtaaatcaaattaacccttccgctttcagtgcatcacgaacatttggacgttctgcaatcctctcttgataagctttaagatgaacccgatcagatagatccaattgcactaaaggtgcccaattactgagagtgaataagtaagcgtcagcaacagtaaaatgctccccggcaatgtatggctgttttgctaatacttcatctatgtacttgaattttctcagtagattattaaccgcaacaggacgataattttctggtgttcctggaaaaaacagaggtgaaaatcctttatgaatttcactggaaatatggctaagccattcaagttgacgatatcgttccatcgttccggctggtgcaattaattttttgtccggtttctggtcggcaatatattggacaataacagagccttcggtgaggatctcattgttatctaacagaagagtgggtatctggccttttggattgattgcgaagaaatcgtcgccgttctccgtttttttggttttcagatcaactttaatcacgctgaaatcaagccctgcttcacggagtatgatgtgaggtgagagagaacaagctccaggttggtaataaagtttcatgtatggctccttaaaaattttcgatataatagaacaaaggaactcagtaaggcattgctatagccttgatatatactaccacgatagatggaaataaatgaatgattaaatagatataaggtggtgtgatggtatcgtgaataactcttttctatactctattatagaagtgatttattagtttttttatcgttattttcaagtagattggttgcattaatctagaaatttaaggagagttttggatggaattacttatccaaaacttccccgtattttgtgttatataccctatggatttcaagatgcattgcggcggcaagggaacgaatccccgggagcatagataactatgtgaccggggtgagagagagcagccaacaaagaagcaacttgaaagatgacgggtatatagcatattttacaactgattatattatatggaataaataatggcgattattgatagttgcaaaaattcatcttatattgattataagataattaatatattatttttgttaaatgatttgtaatcataggaaaataaattgaatttatttgtaaaatcactaaaatagaccatgcattgcctatagtttctcgtgaaaatatcttttttattttcttcattaaagttttcgactaactcattgtaaatattattaattgcttttatttgtccattaagtttattgactgaattgtttatatttctaagactaaatgaaatatctggtatgtttaaagtgatttcttccatcaataaagagagtttatatatttgttttttatcttcgccatctggaatattttttaataattgttgtatttttatatgtgttttttctgcgaagtttttcttactttcaaaatcaatttgagatatttcaaagggttgtggcaattttgagatgaaaccgtctagcttactaaaatctgattgaatttctttcaatgcatgattgactctggcaatataaccatgacctaaatatccactgctaagtgaacctaaataagttgttgctttgtgtatatttttaataattctatcaatatcttgttcatcggaattatatgcatattcataatcttccaatgtggatggccagcgatataatgatccactaaattcattccaagaagctgcaatttcttgggatagatcataatttttcaggcattctggtaattttatattggtaattgatttaaacatattggatataattaaaaaatcatttttcattttatgcaccttgctaaaataataaatatgattaaattgtatgaaatcatgaaatataatattaaaactaaaaggttaaaatgataataaaaataaaatattgtactaaaaatattgaactgataatcgactttatgaaattaagttgttgattatattaaaggacatattactgattagtgcaaggaaacaagatgatattttttatttcggtaaaacaattataaggtaatatcatttaactctttaattacaaaggttttaataattctctccaattgttttttatattttgatttaaaattaatttttacctattagtgatgatttaatgaagtgattaatctatttattttattgataataaaaggcccgaaaaacaggcttttcgggccttggcctcatgaattaaaagttactgattattaatcagattatttcaattccagttcattcattgcggcaatgctgaaaccaccatcaacatgcaggatttcaccggtaataccgccggacagatccgagcacaagaatgccgcggcgttaccaacatcttcagttgttacagtgcggcgaattgggttaacggattcacagtgagccagcatcttacggaaatctttgataccagacgcagccaaagtacggataggcccggcagagataccgttaacacgaataccttcagcgcccatggcgttagccatataacgaacgttagcttccagagatgcttttgccagacccattacattatagttagggattgagcgctctgctcccaggtaggtgagagtcagtaaagcagaatttgggttcagcatttcacggcaagtttttgccatagcaacaaagctgtaagagctgatgtcgtgcgcgattctaaagccttcgcgggtaacggaactgacatagttaccatccagttgatcagcaggtgcaaagccaatggagtgaacaaaaccatcgaatttcggccaaattttgctcagttcggtgaacaggacttcaatgctttcgtcttcagctacatcgcaaggcagaacgatagtagaatttagggaagcagcaaattcttcaacacgaggtttcaacttgtcattttgataagtgaaagccagctcagctccctggtcatgcattgcttttgcaacgccataagcgatggagagtttactggcgacgccagtgatcagaatgcgcttgccggtcataaaacccataacagtatccttgtgtgataacgccggtaatgatattcatggattaaaattgctcacagagacaatatcaatatgacgttttattgttaataaacccagtaattctatcacgctagagagaaatatgctgtattttgcgttctgctccgagcagtgattatcgttttctatatgttaaggaatatcctgccgccaggcatcagcggtgagtgcttcaccaaaatggctagcgattaaacggcgggtcatatcgtgcagaggagaagccaacacttctgctgtatttccccgctcaacaacttccccttgatgcatgaccagcacctgatcgctgatatgtttcatcatgccaagatgctgggtgacatagaggtaagaaataccttgtttttcctgtaattccaacatcagattaatgatttgagatcgcatagacatatcgagtgatgctaatgcctcatcagcaataataatctgaggttgtaatatcaatgcgcgcgccagtgctacccgctgtttctggcctgaggctaacatatgtggataataattggcatggtccggtagcaggccaacttgtcgcaatgtctggttgatccgtttttcccgctccattgtattaagcgctgtattaagcagaaggggaatatcaagaatttgaccaatacgctgacgaggatttagcgacgtacttgggtcctgaaatatcatacgaatgcgttggctacgataactgtaatcaccgtaagtgagtttatggccttcgatcatgatttcgccggaagttggctcgatgacgcctgaaagcatttttgccagtgttgattttccagaaccgttttcaccaataatcgccagcgtctgtttagcttttaaggtaaaactaacgggttttaccgcattgagatgttgacgatgaaaaaaacctgttcgatagcgaaaagttttagccaaattcctaacttctagcagagtattaaccaattactgttcctccagatttagtggaaagtggcaggcaaaagcgtggtttttaatcacccgcaaccgtggtgtttcaatacacgttttttgcgcataagggcaacgcggacctaaacggcagccaatgggtaaatgctcaagggatggaatagcgcctgataaggtgtttaacctgcttttatggggcaaagaactaccaaaatcagggatagcgcggcttaacgcttgtgtgtaagggtggtgtggtgttaccagtaattcatcgggaacggcgctttcgaccgtttgaccacagtacagaacattaatgcgatccaccaatttgctcatgatttgcaagtcatgacttatcagtaaaatggtggtgttattgttctgattcaatcgtgctaacagacggaaaatctgagcttgtgtggtcggttccatcgcattggttggttcatctgcaatcagcaggcgtggttggttcgccaatgcgatagcaatcatgaccttttggcactctccctccgttaactcgcaagggaagctactcatgatgtcattatgatctttaattcccacacggtggagtaattcaatagcccggcgttttcgccatttgaaacgttgccaccaacggcctttgtaagtccagcaggggatagcttgaatgagttgccgaccaatattttcagaaggatcaagacaggattgtggctcctgaaaaatcattgagatattgtggccgatcacttttcggcgctgacgtggagtcagacggagcaggtcaatatcatcgaagcgaaaacggtcagccgtcactttgagattatctttagtgactccgcttattgctttggcaatcaagcttttacctgagccggattcaccaaccagaccgcgtatttcgccttctatcagtgacatactgacgcgatcaaccgctttaaccggccctttggcagtcataaattcaatagtgagattgcgaatgtcgagtaatggcattattccaccccggaattaattgctcggtgtaatccatcacctaataaattgactaacaagacacagaacataattgccgcgccgggcaacataacggtccagggcgcaacatagattagctccagtgaatcgcccaacatggccccccattcgggtgagggaagttgggcaccaagatcgagaaaacccagtgaagcgatatcaagtatggcgatagaaatggcgcgtgttagctcgttgaccaaggcggcggtaatgttgggtaatacggcgtaccatagaatgtggtaattagaagcgccatccaggcgagcggcaataacatattctttatctagctcatcgtgaacagcgctgtaaactgtgcgaacgatacgtggtaatagcgccaaccaaatagcgattattgcatgctgcaaactggcacccacaaaggcgacgacaataattgccaacaagagtgatgggatagagagtaatgtatcgagaatatgattgagcaccgcggatttcagtcctcgtgtcatgcctgccagacagccgataatcagaccacataaagcggcggccaaagtgactaacagcgctgaaccgaatgtagaggcggtacctattagtaatcggctgagaatgtcgcgtccaagatcgtcggtacctagaaaaaatgcgatattaccgtgatatgaccatgaaggtggcagcaactgatgaccaagaaattgttgatcgagcttatagggggccagatagccaccaaacagacttagggcgatcagaatcagcaccccataaaatcccatcattgccaacatgtcagaatagaaaaagcgccagatgacctttatcggtgacggcattttcttttcacgataaaaattatctaagggcataccattccttatgcttcagagggttagtcattgcgccaataatatcagacagaacattgacagaaatcaccagtgtgccaatcaccataacactggcagaaatggcggaataatcttgctggcgaatggcactgactaaccaatgaccaagccccggccagttaaataccagttctgtcatcattgccagtgtcagcatggtggaaaattgtaatcctagtttcggaatgatagggggcaatgcattgtgtaacacatgacgacggataattgtcagccttgataaaccgcgggttgcggcggctttgatatagttttcaccaaaaacttcttctgtactgtttctcatcaaccgaataacttcggttgtcggtgcaacggcgagtgtaataacgggcagcagcaagtgttgtatggcactaatgatcatctcattacgatagggtgattttgataaccaggcatcaattaatgagaaacctgttacaggttcaatctgatatagcagattaaagcgcccggagacaggtagccagccgagataaagagagaaaaatagcgtgagtaataatgctagccaaaaaatcgggatggaaaatccgaccaaagcaatggagatgataacagtatccgcgggtttgttacgccatactcccgcaataatcccgagggggatgccgacgagtaaggcggtagagaaagccagaatacagagctccatggtggcagggaacacttcccgtagttgttcgctgataagttcaccattaatgctggatacgccaaaatcccatagtaataagctgttgaaatagaagatataagcatcaaatagggatgccccgctgagtggcgcattgggggtaaagtaacttaggctaaagcttatcagtgacaagaaaaacagggtaataatcagcaatagcagacggcggagagtgtaaataatcatttgctacccttctgattgatttggttagtctctttttcccgataaacgccagcgaaagaggtattaccaaatggactgagtactagtcctttaatatcatgacggtaggcctgtaaatgcagagaataggctaatggtaatataggtaattgctgctcaaggacttgttgagccgcatgataatatttaattcgggataataattgctggttaatcaaagcttcccgcaaaattttatcaaatgttggctcacaccaatggctgaaatttgtttgtgaagcgatagccgcacaacttaatagtggacggaaaaaactgtctgggtcattactgtcagttgaccagcctgataatgtcatatcgtgagatttatccatcagtttggtttcctgaaagcggccctcaacaggtttgatgctcatggtaataccaacttgggctaaatcggcctgaatcagttctgccattttgagtggacttggattatatgattgagaggcggaaggtacccataaactcaattgcaagccattcaatccgagatcattaagtattttacgggatttttctgggttatattccgtaatttcagtttgattatcataagcccatgacgctctaggtaaaattgatgaggcggtttccgccgtaccataatagatggattgcatcagccgttggttattaatagcgtaagcaatagcttgccgaacctgtagcttatcaagcggtggcttgctggtattgaaagccagataagcgatattcattcctgggcgtaaagttagacgcaggcgaggatcatctcgtaaaacagtaagctgactggcagcgggatacgctaatacatcacattcaccggttaaaagtttagacatcctgccggtgccgccggcaccgacgtcaataactatctggcgcatttgtggtttgcctttccagtatttatcatgacgaaccagacggataaattgtctggtccgatgatcttccaacataaatgggcctgtgccgacaggtttccagtcaatttgttcatggcgattcatttgatgcaattgttgcccatattcttgtgaaagtattggggcatagtgggttgccaaatgccaaagaaaagaagcatctggttcgttcaaacgaaattccaccgtatattcattaagtttacggatactttgaatagaatcggccagttggaggctgtcaaaataggggtaatgcccgccattgacgttgtgataatagtgttgcttatcaaacagacgcttaaagctgaaaatgacgtcatcagcattcatgttacgggtcggagtaaaccagtctgttgattgaaatgagacattatggcgcaaataaaaacggtaggtagcaccgttatccagtatttcccaatgggaggctaattcagggagtaagcgataagtataagggtcaacatctagcagacgctcatagagttgtgctgccagtgtatcgacagttaaaccgctgctagccagttggggattaaaggtgttcaggttgccattaacacaataaatgaacccttgttgctgaatgtcagtcggaacgtggggatttttttcaggcgtagttattgtttctgcaatagccggtgctgaaagggataatatgatccaataaatcaaactgcgcatatagggcatctgttattaattagaattgacacattgtatctcaattcgcgcttgagcccaaaaaaacgctgcgggaatggtaatgagaaaaattctcaataaagtgctttacaaaacgtattgataaccattatcatctgtatcgctcttccgggaaacagcttttgttatctcaggaaaagcacgacattgctcacattgcttccagtgttttttagccagctcgggtgctggcttttttttatctgtaattcggattacttctcgccgacgttgatatcatgtttcttcattaagcctcgtaattgataataggtcagtcgtagtttctctgctgcttttctttggttaaatctgctctcttttaatgataacgctattaattgtcgttcgctgtcatgttgccactgtttcaaattaacaggcaatgaaggcagaagttgtggagataaatcatgactatcatcaacattggcaataaaatgtggtgtggaggcgaatggattaataataatattatcaagttgagcagaattttcgccgtgacgataaaccgatcgttccacaacatttttcagttcacgaatattaccgggccacgtgtaattctgtaactgttgccttgcctggtcagtgaaaccgggaaataggggtaaatcaagttcgcggcacatctgaatagcaaaatgttgcgctaacaacatgatatcctgctgccgttgccgcaatggtgggatattaaccacatcgaaagccagcctatcgagcaaatcagcgcggaattgccccttagctgccattgcgggcagattatcattggttgcgcatatcagccgagcatcgacttgtaatgattggctgccgccaacgcgttcaagatgcccatattcaatgacacgcaatagcttttcctgaacttgcattggtgcggttgccaattcatcaagaaatagcgttcctccatcagcacgttcaaatcttccttggtgcctcttttgtgccccggtaaatgcgccagcttcatgaccaaataactctgaatccaataaattttcattcagcgccgcgcagtttagggagataaatgggccttgccagcggggagataaataatgtaaacggcgggcaatcagctccttgccggttccgcgttccccaatcacgataacgggtttgcttaattttgccagcgcggatacctgctccagaatttcaagaaagctgtttgcttcacccaataggttttctgtggcgtcattcatggttattttcaccgacaattggttattttagccactttattatgttgtgataaaaagttaaataaaaaaatttatttatatttcatgaaaatagagtaaataaaaagttggcacgactcttgataggatagaagtgacatgaatagtattaaccaaccttaaccaaagaggataatttgctatgagtattttttctcgttttgctgatatcgtgaatgccaatatctcttcattactggataaagcggaagatccgcagaaaatgattcgtctaatgattcaggagatggaagacactttagttgaaattcgctcaacttccgcccgtgctctggcagagaaaaagcagttatctcgccgcattaccgcaggtgaacaacaaatgcacgattggcaggaaaaagcggaactggcgttgaataaagagagagaggatttggcgcgggccgccctgcttgaaaagcagaaagtggctactttagtggatacattgaaacacgaattgaccatactggaagagacacttgagcgaatgaaaggggagattgttgagcttgaaaacaaacttagcgaaacccgagcaagacagcaggcgttggctttgcgtcatcaggcggccgcctcttcccgacaggttcgtcatcagctagacagcggtaaaattgatcaggcaatggctcgcttcgaacaatttgagcgccgtatcgatcatatggaagcggaagcagaagccgtgggcatgggaaaacaaaaatcgttggatcaacagtttgctgaattaaaagcagacgatgaaatcagtgcgcagttagcggcaatgaaggctaaaataaatgctaataaagaacaacattaaatgttggtgcactcaactcaccattaaggaaaagtgatgggctctatatttcttggcattccgctgactatttttgtactttttgtgttacccatctggttgtggttgcattataacagccggaattccaatcaaagccagttagatcagaatgaaattcagcgtctggcagagcgtgttcaacatatgcaggcacgaatcaaaacattggaagatattctggatgcggaacatcctgattggaggcaatcataatgtcgaatggtaaccgccggaaactgtatcgaatacccgaaaagggtaaaattaaaggtgtttgtgctgggttggcctattattttgatgtaccagtacgtttaattcgagccatcgcggtattgtcgctcttctttggcctgtttggttttgtggttgttgcttatattgtactggttttcgtccttgatccggcaccctcggaatataccgaagaggcccatttttcagcacaaaacttgctgaatgaaatcgactatcaattgaaatcgggagagattcgtctgcgccaaatggagcgttatatcacctcagaaacgttcagcgttcgcagccgtttcaggcagctttgatagcaaaaattacctatggctcggctgatacaaaaaaattgttgtaatacttctcacaggagagacatgaaacggctacaaaatgaattaactgcgctggttaatcgtgggatggatcgccatttacggctagctgtaacaggattaagtcgtagtggtaaaacagcgtttatcacatctttggttaatcagttacttaacctccatagcggtgctcgattgccgctattttctgctgtacgcgacggtcgcttgttgggtgtaaaacgggttcctcaacgtgatttaggcgttcctcgttttacttatgatgaagggttgaccgcactttacggcacaccacctgcctggccgaccccgacgcgaggtgtcagtgaaatccgtctggcacttcgttaccgttctggcgattctctgctgcgccattttaaagacactgccacgttatatctggaaattgtggattatcccggcgaatggctgttggatctaccgatgttggcgcaaagctatttggcatggtcacatcagatgaatagcttattgcagggacaaagagctgaatgggcaaaaccttggttggaactttgtcaacagtgcgatccactggcacccgcagatgagaatctgttggctactattgctcggtcctatacggaatatttgattaaatgcaaagagcaaggcttacattttattcagccggggagatttgttctgcccggcgatatgatgggcgctccggctttacaatttttcccgtggccggatatcaaccctatcactgagtcacgatttgctcaggcagatagacacacgaatatcggtatgctgcgtcagcgctttgaatattactgccagtcggtggtgaaagggttttataaagcgcattttctacgttttgatcggcagattgtgttgatagattgtttacagccattaaacagtgggccacaagcatttaatgatatgcgtttggcgctggcacaattaatgcaaagttttcattatggtaaacgaacgctcttccgccgcctgttttccccttgtattgataaattaatgttcgctgccagtaaggccgatcacgttaccgcagatcagcatgctaatttggtttctttactccagcaattggttcaggaagccagacaaaatgcggtttttgaaggtatcagcatggattgtgttggcctggcatcggtacgggcgacagaaagtggcatgattgaacacaatggtgaaagtattccggcgttgaaaggatatcggcttacagatggtaagccgctgacattttttcccggagaggtgccacggcgtttacctgaggataacttctggcaaaaacagggtttctccttcgaggagtttagcccttgtccggtaaatgttgatacaccattgcctcatatccggttggataccgtgctggagtttttagtgggagataaagtgaaatgacggagcctttgaagccaagaattgactttgcagaatccttatcggggccacaagagccggtcttaaagcctgcccagatctttaatgaaaaagagacagcgaatttttgtcctgcttcaccagaacttgaggctgaagaacgcgaaggtcaggtagaagggatagttaatgcagcactgaaacctaagcgtagtggctggcgtaaaatggtatatggttctctgatgttattggggctgagtgcggttgctcagtttgtgcagtggatttatcaatcatggcagcaacaggattggagcgcattaggtgtagcggccgccgggagcatgattgtctttgcgggaataggttctcttgtcagtgagtggcatcgtctttatcggctaagagtgaggtctgaggaacgtgatactgcgagagcgttattgcaacatcatggcgtgggtaaagggcgggaattttgcgagaagttggcaagtcaagcgggtatcgaacagcataacccggcgttacagcgctggcgggctgctttacatgatacacataacgatcgtgaagtggtggtgttgtacagtaaatgggttcaacctgttttggattctcaagtcagggctgaaatcagccgctgtgctgcggaatcagcattaatgatagcagttagcccgttggccattgtcgatatggcatttattgcctggcgtaatatccggctaattaatcgtattgcagctctatatggtattgaactgggatatttcagtcgtattcggctcttccgccttgttttgctgaatattgttttttctggtgcttcagaagtggtgcgggaagtgggtatggattggttatcgcaggatatcgctgcgcgcctttctgtcagagctgctcaagggatcggtgtcggtttactgactgcccggttgggtatcaaagcgatggaattatgtaggccattaccttggatagaaggtgataaacctaaattaggagatttccgtcgtcagctaatcactcaacttaagaatatcctgccaaataagtctaagaatatagttaattaaatgatatatgctttaattctatatgaacgcacaaaatatccagataacgacaatcttttacgttattttattaatttgttttataatcaatcttacaatttgtttattttagtgaaagtttcaaatgctatgttatttgcgacattaaaaaaccggagtccggtcaatttttactgacagaatgcttcatatgaataattgtagagagtagtattttaaaaaattatatgtattaatgtaaataaggtcaaaacagatgcgcttagaagttgtttgccatgatcgaattgggctgacccgtgaactgctcgatctactggtattagagaatattgatttaaaagggatagaaatatctcaaatcggccggatttaccttaatttttcaccagttgatttcaatgtatttcgtaaattgatggcagaaattcgccggattaatggtgttattgatgttcgtaccgtctcttttatgccttcagaaagagaacacaaagcgatgtgtgcactgttggaatccttgcctgagcctgttttttcagttgatctgaaaggaaatattgagcttgctaactctgcggtgtttaagctatttggtgttagtgaagaacaaacttatcaaaaacctatcgggcagtttatcagcggttataatttttcgcgctggtttgaaaataaaaatatccagcaacgtgtggaaaggataacgctcaaaggtctggactacctgatggatattacgcctattcaactgatggatgaaaagcagaaaatgcaatgtgttggcacagtgattatgctcaaatctgctgctcgaatagggaatcaactgaaaaaactgactgtcaatgatggtagtgagtttaaggcgattatcgctgttagcccaaaaatggctcagattattgagcaggcgcgtaaaatggcgatgctggatgcgccactgttgctgattggcgagacaggaacgggcaaagatattctggcaaaagcctgtcatttgcacagcttacgcggaaagcagccctttttggggttgaactgcgcatcgatgccggatgatgtagtagaaagtgaactgtttggctatgctgctggcgcttatcctaatgcgattgaaggaaagaaaggtttcttcgagcaggctaatggtggcacggttttactggatgaaattggtgaaatgtcgccacagatgcaaattaagctgctacgttttcttaatgacggtactttccgccgagtaggggaagaaaatgaagtcaaagtgaatgtcagagttatctgtgcgacacaaaaaaatctggttgaattggtgcaacgaggggaatttcgcgaagatctctattatcgccttaatgtgttggcgattacgctcccgtcgttgcgtgatcgtaaaacagatattatgccgctggtggagtattttattgagcgtttttctgaagaacagggagtaccgaaaccgaaattgtcccctgaactttcccactttctgacgagttacagttggcccggtaacgtaaggcagttacaaaatgccatctatcgggcgctgactcagcttgaaaatatggagttgacgccgcgggatatacaactgccagagtttgaaacagaggtttcttttagtgaagatgtgttcaatggttctctggatgaaatcagtaaacgttttgaacgttcggtgttaacgcgtctttatcggcactatcccagcacgcgtaaactggctaaacgtcttggggtatcgcatactgcgattgccaataaattgagagaatacggtctgagtagcaggaagcatgctaccgaatatgagccggatggtgacgaataaaacaatgcccaccggaagtgggcataaatcatgggatttatttcagtgcggccagtgcgctatcgtaatctggctcattagtgatttcatcaaccagttggctataaatcacgttatcgctttcatcaagcacaatgactgcacgggctgtgagaccactcagaggactaccgctgatggcaacgccataatcttcactgaaagtaccgccacgcagggtagacagcgtgacgacatttgataacccttccgcaccacagaaacgggactgagcaaaaggcaggtcggcagaaatgcacagtacgacggtattttccaaatcactcgctacctgattaaatttgcgtactgatgccgcacaaacaccggtatcgatacttgggaaaatattcagcactttacgctttccggcatagtggctaagagagacatcggagagatctttggctgtcagagtaaaatcttgcgctttttcccctgattttgggaactggccgcttacggagatatcattgccttgaaattttactgtttgtgtcatagttttcttcctctgataaatgaaccacgattgcccagtgtagaagaatattcggctcttgcccatcaaaaatagtgcttgtgagagtaaaattgtctgattgtgtcattctgacaatggcttataatttagtaatgggatatctattttataacagggcagattattaccttatgcgctatttcaatttgatttcttgtgcactacttatcaatagttctcttatcaccgtttctgcttttgctgcggaagttccttctggcactcagcttaatgacaaacaggaactggttcgtcacctaaaagacgaaccggcatccttagacccgattaatgccgtgggtttgaccgaggcgcaagttcagcgtgatctgtttgaagggctggtgaatcaggacgcgtatggcaatgcgattcccggtgtagcaatagcgtggaaaacagcagacaacaaaacttggttttttaccctgcgttctgatgcccgttggtcaaacggcgaacccgttaccgcgacagattttgtatatagttggcagcggttggtcactccggctaatacgtcatcttttgcttggtttgccgcactagcaggtattgaaaatgctcaggaaattattgacggtaaactgctaccagcaaaactgggtgttgaagccattgacaagcacacattaaaggtgacgttaaaccggcctgtgccttattttcccaacctgactgcgaatttcagtctctatccggtcaataagaaagtagttgaaaaatatgggaaagagtggataaaggttggtcatttggtggggaatggggctttcgaattacatgatagaattgttaatgagaaaatcgttctgacatcaaacccttattactgggatcataaaaaaaccgtcctgaccaaagtcacattcgtacccattaatcaagaatcgcacgcgactaaacgctatctggcggatgatttggatatcaccgaatccttcccgaaaaatatgtataaaaaattgcagcatgaattatctgggcaagtctatacgccggatcagttggggacctattattacgcttttaacacccaacgtgcaccaacgaatgatgccagagtgcgtaaagcgctttctatgaccattgaccgtaaaattattgcggaaaaagtcttggcgacaggggagaaacctgcctggcattttacgccggatgtgaccgcgggtttccatcctgtgatcagtgacatggaacaacatacgcaagcagaattggaccaacaggctaaagttttgttacacgcggcgggttacggtccgaacaatccactgaaactttctctactctataataattccgaaaatcaccaaaaaattgcgattgcgattgcttctatgtggaagaaaaagttgggtgtacaagtgaatttggtgaatcaggaatggaaaacgtatattgatagccgtaacacaggcaattttgatgttattcgtgcatcttgggtgggtgattataacgagccctcgacatttctaagcctgctaacttcaacgcatagtggcaatattgctaaattccatcaggcaaattacgacaaactactacaatctgctagtttgcgaacagatgatggcttaagaaacgatgactataacaaagcggagcaaatgattgctgaacaggcacctattgcaccgatttatcagtacactaacggcaggttgataaaaccttggttaaaaggatacccgatcaccaatccggaagacgtggcatatagtcatactatgtacataattaaacactaagggtaaggagctggatgtggaaaccatttatggctcatcattgaaagaggctgatgcagtctatgcttgtcagtttgatggtcaaggcggcatgacaccaattgacatgaatggagtagccacaccagttcaacctttttggcaacatttggattaccgtaaccccaagagctaccgctggctaatggacactgatttgttaccagaaacggttaaagcggggttggctggagagagtcttaggccgaaaataatgcgtaccggcgatggtacgatgattacatttcgaacaattaataacagtgagagtgaacgccctgatcaattagtggtatttcgtatttatattaattctcagatcgtcatttccagtcgccatcgtaaagttcattcgcttgaacaggtactgagtgatttacaaaatggtataggtgcgaaaacgaccgggcattggttggttgaaatggttgatgcaataaccgatgaagtgggtaattttattgaagatcttcatgacaatctgattgagcttgagaatatgattcttgagcaacggatacctgggcggggtgggttagctttgttgcgtaaacaattgattattctgcgtcgttatatggcacctcagagagatgtatttgcccggcttgcgagtgaaaaattactttggatgagtgatgaagatcgttaccgaatgcaggaaatatctgatcgcttgggaagagaattggatgatttggatggttgtattgctcgcacggcaattatttcagatgaaattacatcgatgatggcggatgcgatgaatcggcgtacttatactatgtcattacttgctatgatttttttaccgacaacattcctgaccggattatttggtgtcaaccttggtggtattcctggcaatgaatattatttaggttttgctatcttttgcttattgttattcgggttggttttatttgttgcgtggtggttaaagaaaagtaaatggttgtgaggattaaagagttatttggagagataaaacataactgcgataaagtgttaccaaaattgattcttaatttgagatatatcaatattcactagacatcattgaggcatgatagctctcgcaggtgaaaacaacgttaagcgatgaacgttgttctccgtaattgtagtttttctcacataagtctttatacagaataattgcccattcttgtgccgatattattttataatatcggctttttttatttttcatttgttgttttaggaaaataaaaaaatcgaggcgaaagtgaaagagaagcagaaattaacgctctgaagtatatccagagcggtgtgattaagagcctactccaatagtcctattgggatatacccgttatccttcaagttgcctctttgttggctgcgctcgctcaccccggtcacatcgtttgccatgctcccggggattctctcccttgccgtcgcgatccatcttgaaatccatagggtataggtagtaagaataactatttgacttcaataatatccaaccgttctgattgataattgggttgatcttctatatcaacaacgggttgcatgggtaattcctcgcggtcaaaggcgagatcaccaccatcaatcacctcgctgccgtgagtgatactcttaaaatcaaacagattaaaatcgctgagatgtgacggaacaacattttgcactgcacgaaacatggtttcaattctgcccggataacgcttatcccattcccgtaacatatccttgataacctggcgttgcagattgggttgcgaaccacagagattacaaggaatgatcgggaatgctttggcggttgcatagcgctcaatatctttctcgcgacaataagcgagagggcgaatgacaatatgtttaccatcatcactcatcaactttggtggcataccttttagtttgccgccataaaacatgttgagaaatagggtttgcaaaatatcatcacggtgatggcctaatgcaattttcgttgcgcccaactcagtggctgtacgatataaaatgccacggcgcaggcgggaacagagtgaacaagttgttttaccttcgggtattttttctttcactatgccataagtgttttcttcgacaattttatattcgacacccagttcacccagataagcgggaaggatatgctcaggaaagccgggttgtttctgatccagattaactgcaacaagtgaaaaattaaccggagcacttttttgcagattttgcaggatagatagcagggtatagctgtctttaccaccagaaaggcagaccataatacgatcgccttcctcaatcatattgaaatcagcgattgcttgaccgacatcacggcgtaaacgcttctgtaatttgttcagattatattgttgtttttgatccaccacggacactcgtagataatgtttaaatgggatttaggggaaggagtataccatttttatggcctgacaccttaaaagagtttgtgatagattccgcttatttttacctgttaatgctgatcaattaatagttttttctgtatggaaaatgaggatcgctcatactctaaattctgttgataaccgatatcagaatggagatgaaaatcaaattacggtgttgcaattcaatcatggtctggctgttattcagaatgtcaattatcagccggtaaactttattaaactattagataaatcttccctattgctaatgatagcgggttgttagccgtgaaaaactggaactgatatttgatgtttattaaaactcttaaatatacccgttatctttcaagttgcctctttgttggctgcactcactcaccccggtcacatagttatctatgctcccggggattcgctcccttgccgccgcgatgcatcttgaaatccatagggtataggtttagcacaatgaataatgtttttgaattaagattattattgttgatatgagagaaaatgctacacctatataagtggtaatgatatatatttttatccaatgagttaagctggagggtagattttgaataaaattataagattcttggtgcatatatttgctatcaggatgatttgttttcatttttttccagttaacagcctgtagaaaaacataacgacttgaaactgatcacgcatccttccgaagcgttgtattgttatgcctgttggtaaataaaatccttcttctatatataattcaataattttatccatctttttttgatttattttataaatggctattgatataaccaaaaataaaagagataagaaaagacatattgtcattatcaaatctaatattctcatagttaatttcctataaaaaaatccacagtaaattccgcagttttctcaaatccatagttacctatagccttcctggctacgtgttcttctaaaaaattcttaattaaaaaacggcaagatatatttatcatatgtaagaaatactattccaatagcgaaagataataaactgattaagagataataacaataagaggaattactctgtgcatattcatctccaaaaaaatactcaatagcagatttacccattacattttccatttttattcttaatttgatctccaaattttagtgcgtattttgagttgaattcagttaaaaatataagagtatttatgacataaagccgttactgttgatataaaaaaagatataaaacttatattaatggtgatgaaatatatttttatccagtgggtcaaattggagggtaagttttgaatgaaatcataagattcttgtggcatatatttactaccaggctcatttatccttattcttttccctgttaataacttatagaaaaatacggcaggatgaatctgaccatgaatacccatagaatgaccaatgtatgctgctgatgataagcaaaaacctttttccatatataaatcaataattttatccatctttttttgatttattttgtaaatggctattgatataatgagaaaaagattgaaagaggtataagaaataaccaagatgatgaaagtaactctattcatattaaaacctcattgaatgtccagtatagttaagcgtattctctgaatagaaatgttatcattgttatgaagaagaatacaccacttatattaatggtgatgaaatatatctttatccaatgagttaaactggaaggtaggttttgaataaagttataagattcttgatacatatattttctatccttttcattgattctcattcttcttccagtgagtagcatataaaaaaatatcgcaacctgatactgaccataaacacccaaaaaacggcccagctttacgcctgctgataaataaagtccttttcctatatatgattcaataattttatccattttactttggtttattttgtaaatagttattgatataatgaaaaaaaagaagagaaaaataacggaaatgatggttattaggtctaatattttcataataaatgctctataaatagatctgcgaaaaatcccatagtcttctctaatccatagcatagctagctaagtgtttttctaaaaaaatcttaattaaaaaatagctcatttttgctcgttctgacatataaagtccagcttctgtatataattcaatgattttattgatgttgcgctgatttatcttgtaaatagctattgatattaggtttagcacgaaaaataatacttttgaattaagattattattgttgatatgagagaaaatgctgcacctatataagtggtaatgatacatattttcatccaatgcgttaaactgaagggtagattttgaataaagttataggattcttggtgcatatatttactatcaggctgatttatcttcattttttttccagttaacagcctgtagaagaacataacgacttgaaactgatcacgcatccttccgaagcgttgtattgttatgcctgttggtaaataaaatccttcttctatatataattcaataattttatccatctttttttgatttattttataaatggctattgatataaccaaaaataaaagagataagaaaagacattttgtcattatcaaatctaatatgctcatagttaatttcctataaaaaaatctacagtaaattccgcagttttctcaaatccatagttacctatagccttcctggttacgtgttcttctaaaaaattcttaattaaaaaacggcaagatatatttatcatatgtaagaaatactattccaatagcgaaagataataacaataagaggaattactctgtgcatattcatatccaaaaaaatactcaatagcagatttacccattacatttttcatttttattcttaatttgatctccgaattttagtgcgtattttaagttgagttcagttaaaaatataagagtatttatgacataaagccgttactgttgatataaagaaggatataaaacttatattaatggtgatgaaatatatttttatccagtgggtcaaattggagggtaagttttgaatgaaatcataagattcttgtggcatatatttactactaggctcatttatccttattcttttccctgttaataacttatagaaaaatacggcaggatgaatctgaccatgaatacccatagaatgaccaatgtatgctgctgatgataagcaaaaacctttttccatatataaatcaataattttatccatctttctttgatttattttgtaaataattattgatataattaaaaataagaagaaaaaaataacggagataatggttattagatctaatatgctcataaaaaatgctctataaatatatccgcgaaaaatcccatagtcttctcaaatccatagctacctatagccccaccagttaaaccgccgcccgccatgcaaattccaacagctaatccttcagttgcaaacccaagggcaacacatgctgctcctgctgctatactgccaccatatcctacggctatcccacctcctgttctaccagcaaatttactatattccttgatggttactttttcacattttcctgcttgcccataattacaggcatcaataacctgcccggtggtatcaacaaaatccagaccaatggcaacccggccaccatatttcatccatttaatcattttttcactttgtaaaattgtttgactatatccctttattgcgccaatccctgctttatcccattggtgagcaatggctttggttgataactttagcgcatgttttaaattaggatgttgatcgattttcaaagagagtcggccaactttatttaataatccctttaggttacccataatcagttgtctttctacataaaactcgggactggcaaattttcggtttagcccatttaaccgatattctctttgataaagcttctgtaactttgacagattttttttgatttgggagaaataagtatcacccagtgacgatgcggtgccaactaaggttcctccctgatccagtacatagtgaaacagaccaaaatgacgatgcaaaaatgctgcggattcattaggcagagctgaaacggattggttgacctgatactgagattgtcttaatagctgtatcatgtggggcggattataagagtctggatctgccaccagcagaatttgccccggtttcaggaatcggtaatttgaatttaatgccataaaatagcgagccgcttcgctatttgaatggctgaataacagactggcttgaaaacttaatcctccaggttgctgtacgacacagaaaccgggttgaatgtttcttttcataaatactctatttgttcctgtggtagcttttaacatgttggcctgacgttagatgacataacttaatcagataatcggattattttcaacatataataaatgggtttctaatctttacagagtgagaatttatagggagtaggtgatgtataaattcaatctgatgttgtcggttgatattgattaatttgcagttttttctttgctaaaggatagtaatagtgaacgtaatttgtttatatatttggtctgactacgagccttcaatatttacatttatataagatagttaacaatttgttacaattatcttatggaaattacaattattttattgaaatcaaaggaaaataactcagaatgagaacttgaacataaggtaaattaagtaggtatagttatggcaaatatgatttatgtgacgataaaaggtgaatctcaggggcttatttctcaaggatgttcgactttggattccattggtaatcggtatcagcatggacatgaaaatcaaattatggtgttgcaattcaatcatggtctgacagttgctcagaatgttaattatcagccggtaaacttcattaaactattagataaatcttccccattgttaatgatagcggcagctaatcatgaaagactggagttgacatttgatatttatcggacttctcaaataggttcacaggaacttttttattccatcttgctcaccggggcaaaaatttgtgatttaaatgttaattgtccgcatgttattaatgataataacggccagccggaggaagttatttcagttcagtatgttaatattacttgtcggcatcatatggcgggaacatcaggatattgcatttgggatgagatggtttattgataaatacagtttatacccgttatctttcaagttgcctctttgttggccgcactcactcaccccggtcacatagttatctatgctcccggggattcgctcccttgccgccgcgatgcatcttgaaatcaatagggtatatacgcttagttttcatttaatagctaagcgtgtttttaaaagtaagtatattgctattgatataatgatgctattaatattaatatcccattgaataaataacgtttcgtaattatgctacacatagccttcttcaacccattgttatacatagaattatgagtggtataagatgtagcactattttgaaatcttatttattcaacaataagtttaataagccattttcctcctttactatccatataaccacccgccatgcaaatttcagcagctaatctttcagttgttgcgccaagagtaacatatgttggctcaacgttggacaacataacttccttatcgtttcgtcaccatcattgcttaatcaaatgataagattatttttagcttataaatgtacacgtttttaattctacagtgctatgttttcttagaaatcctaaagggtatcggcgaatgattctgatctaaatctcaaagctggaacctatcgttagtacttttccatattctctgtaaaatcgctccaacgattttcctgcctgagtggtacttcttaagcagggggtaaataaggtttgaattggatttaaggaacgaaatatatcaattttgttacgttacaccttaaagcgtttgtgataaattcaatccgtttttgtctattaatgttggtcgatttattttttctactatagagagttaggatatgaatggatttgtatatttagcaatggcaattgttgctgaggttatcgcaacggcttcattaaaagcctctgatgggtttagtaaattattcccttctatactggtcattgttggatacggtatcgctttctgggggttatctcaggtggtcaaagttgtgccattaggaattgcttacgccatatggtctggcttgggtattgtgttggtttctattgccgcgatatttttatatcaacagaagctggattgggcggctattttaggtatggctcttattgttgccggtgtaatggtaataaacctgctttctaacagcagtgcacattaattaacaattaacggtgctcctgttttccctgaatcgttttctggagaagagatatgttaaatgccagtaataagaaaggattccagacagtgttattaggagtcctctttagtattgctgtattagcgggttgtagtcgccagacagggaaaacagcgactcaatatcaggggatacaatactctcaaccggaaaattctcaaccggcagttgctcttagggataatgccagagcaatctgttcttatgtaggtggcatgcctgcattagcaatacaattaaatggtgcgcaaatacctgtttgccagttggcaaatggtaagcgttgtgatgaaagggcattgttgcaaggttcttgtgcgtcaagttgaaaggtgaggtagaaatcaagcaactgatatgagcagaaacatgccgttggaaaggcagccttgggcatgattctgtgagtatacctgtcatctttcaagttgcttctttgttggctgcactcactcaccccggtcacatagttatctatgctcccggggattcgctcccttgccgtcgcgatgcatcttgaaatccattgggtatatatttgattcatcagacaatcattttcaactatctaagttggaaattatttacggctaaaaaattggctgattaatactaatgcagcaaccactaggtaagcagcaaaaataccgactagccattgtggcatctctaatgtcaggaattgccactgtcttactgaacaatcacctgtagcttcgaatacagaaggaagccattggtttaacgccaaccatgaagggaagtttacgaagaaatcacaggtattaaatggagaagggtgcaactgcatcatagtatgttgccatgcgagttgcaggccaccccaggcactgtagatccacaaaataatagccagccagcgtaacggcgtttttggtgcgattacacctaatatcccagcgctcaacacaccaaacagagcaacccgctcataaatacacatcacacagggttgtaatttcatcacatgttgaaaatataatgccgagctttctagtatcagggcagtcaaaatcattaacagccatgcgcttcgtccttgagaacagtggttcaaaaatcgcatcatttccgtttttccatgcagattaagataaacaattgagcgcctattttgccgatttacaggtaacaaaaaaagtcaattaaggtaaatttggctttttcggggaaaaataatgccgtattgagcgttatcattgctcaatacggcattggctggttaatgctataaaatgaattattgctggttatggcaaagcaattaggccccaatgaaccatcatgtcagtgactggaattagcagaaattctacacacagcaaaccgaccagcgtcatgacaatggtataaggtagtgccattatcaccatgcggccataagataaacgaatcaatggcgataatgtcgacgtcaacaggaatagaaatgcagcttgtccgttaggtgtggcaacggaaggcaggtttgtgccggtattaatcgcaacagccagatattcaaattgtttatgtgaaatcaggccctcttgcatcgcagttcttgcttcattgatataaaccgtaccgacaaatacgttatctgatactgatgagagtaagccattgaacagatagaacagggaaagttgagaagtttcagaaacctgtaatacgaactgaataaatggcgtaaacagttgctggtcaacaatgacggcaacgatagaaaagaatacagtcagtaatgccgtgaacggtagtgcctcttcaaatgccttacccagtgcatgttcttcggtaataccacagaacgacgtggttagaataatgacggaaaggccaatcagaccaacttctgccagatgaaacgccagcgcgacaatgagccatataccgattagcgcttgagcaataagctgtgctttttctttatgtgttcgttttgcgctggtttttttatcgtaatcttccaatacctgtcggacgcgttctggcaattctgtaccataaccgaacagtttaaagtgttcgaccagaaaacagactagtagcccgcagataaagacaggtagggtaattggagccatgcgaataaagaaggtgacaaaatcccaattaacgtttttggcgataatcagattttggggttctcctaccatcgtcatcacaccaccaagtgcagtgcctacccctgcatgcatcattagactgcgcaaaaaagcgcgaaactgttcaagagtttgtttcttttttgctgtatcaatgtgattgtcatgtttagcgttaatgacatcattctgatcagtaatgaagttgttgtagatagaatagaagccaagggaaacactaataactaccgcgataactgtcagagcatcaagaaatgctgacaggaatgcgctggctaggcagaatgctaaggcaagcatacgtttagattttatggagagcaggagtttagtgaaagcaaataatagtaattgcttcataaagtaaattcctgcgaccataaatatcagtaacagtacaacttccaagttattagcaatttcatgaccgacttgttgcggggaggtcatgccgatgatgaccgcttcaattgccaacaggccacccggttgtaacgggtaacatttaagtgccattgctaacgtaaagataaattcgataacaagcagccagcctgtgacaaatggattaataaaaaagaatatcaatgggttgatgatgagaaagatgatgatagcgagcttataccaatctggcgagttgccgagaaagttttttaccgctgtttttaggatactggtttccattgcaattaaagttcctctaaattcgtaaaatcgtgttctttaaacaatagtacgcttttatacagaatgttttaagggaaatgaggcataactaagcatgagtacgctttttttcatgaccgcctttacgctttctagactacatagctatattgaagttgcgtattctgatataatttcatctattattagttggaaaaatcacgttggaataataaaaatatggtcattaaggctcaaagtcccgcaggttttgcggaagagtatattattgagagtatatggaacggccgttttcctccaggctctattcttccggcagaacgtgaattatctgagttaattggtgtgacaaggaccaccctgcgtgaagtattgcagcgtttggcacgtgatggatggttaacaattcagcatggcaaaccaacaaaagtgaataacttttgggaaacatcgggtcttaatattttagagactctggcccgtcttgatcacgatcgcgttcctgagttgattgataatctactggcggtgagaacgaatattgcagcgatatttattcgcacggcttttaagcataatccgggtaactcattggaagtactggcagaaaaggagcatgtggaagataattcagagtcatttagtatgctagattatgatattttccgtggtttagcttttgcttcaggtaatccaatttacggccttattatcaatgggttgaaagggctatatacccgtatagggcgttattacttctctaatcctgaggcgcgtaaattggcgctgaatttttatcagcaattggtgatattatgtcgtgatcaatcttacgataacgtcatggaatgtgtacgtaactatggtaaagagagtggtgtcatttggcacagtatgcaaagtacgatgccaagtgatttgtctgaagtgtatcgctgatatctcgttagtatttttacttaattccaggcgttatccgatctattagtttcaaatcaacattattttaaattgacccggtgcagaatgttctgtaccgggcattttgtttcttttttttcattccatctccagccaatcgttaatgtctctatttcagagtattattctgattttttggtttttgtttgggtttttatttcgattaattgatggttattggtatcttgtggttgtttaattgattcatttttttcaccgaaaaacgctgaataatgacttgatatgaaataattagcctgcggctcatatcgtaattattatcttaattttatgattttaatattaattttcataacttggttatgtataaatcataaataagtctgttgcataaatgtaatctaattgtgatctaaatcataaatatagattattgacgtgaccgatgattgttctatattggttttttataaacagcatattatgcttgcctaaaattttaaattgtccgggggccatgatgaaaatccttattttaggtagtggtgttattggtgtaaccagtgcctggtatttggtacagcaaggtcatgaagtcactgtcattgatcgccagggaagtgctgctgaggaaaccagtgcggcgaatgccgggcagatctcaccgggatacgcaaccccgtggggagcgccgggtattccattgaaagcgattaagtggatgtttcaacgtcatgctccattggctattcgtccggatggatcgctgtttcagttacgctggatgtggcagatgttgcgtaattgtgatgcaagtcactatgcgataaataagagccggatggtacgattggcagagtacagtcgtgactgtatcaaacagttgagggctgatacgggtattcaatacgaagggcgtcagagaggcacgcttcagttattccgcaccaataagcagtttgataatgcggtgaatgacatcgccgttcttgaacaggaaggtgttccttacaatttattaacggcagataaactcgcgacagtagagccggcattggcgcatgccgctcacaaactgacggggggcttacaattaccgaacgacgaaacgggtgattgccagctttttaccaaagagttggtaaaaatggcagaagcggcaggtgtaacgtttttgtttaataaacaggtcaaacagttattggtggaagggcatcggattatcggcgtccagtgcgaagatggtgttatgacagcagacaactatgttgttgcaatgggagcttattccactgaattactgaaaggtcttgtcaaaattccggtatatccactgaaaggttattcattaactatgcctattgtcgatgcggaacgggctccggtatctactgcattggatgaaacatacaaaattgcgattacccggtttgataaccgtattcgtgtgggtggaatggcagaagttgtcggtttcaatttgaatctgcttaaagcacgtcatgaaacattgaaaatggtggtgcaagacctttatccaggtggtggcgatattactcagactcatttttggacaggattacgtccaatgacgccagatggtacgccaattgttggtccgactgaatatcacaatctctacctaaatacagggcatggtacattgggatggacaatggcatgcggttccagtcaattactggcggatattatttcgggtaaaaagcctgctattgcatctgatgatttatccgtatttcgttatgttaatggttttaatacaaaattggtgccatttagccatcaattacacactgaactgagaggctaatagaatatgccacgtccgatttcggcaacgatccatcttgatgcattggaaaataatttggcgattattcgtaataaggtcggtaatagtaaaatctgggctgttgttaaagcaaatgcttatgggcatggtctgcattgtatatggcggtctcttgatcaggctgatgggtttgctttacttgattttcatgaagcgattttattgcgggagcaggggtggcagggtgcaatcttactattggaagggtttttcaaacccgaagatttgccaataattgatgaatatcagttgacaacggtggtgcatagccattggcaacttgaagcaatagaagcggccaatttgagtaaacccatcaatatttatctcaaactcaacagcggtatgaatcgattgggatttcctgcggatcaatatagcgcggttttatcattagcaagagggatccggcaaattgggcaaataacgttaatgtcacattttgcgaatgcggataaggataataaggagatcagcgttactgaacaacttaacgttattcattcggtgagtcagggattggatatttctcaatgtttggcgaattcagccgcttccttgtggtatccacaaactcatagagattgggtacgtcccggtatcgtgctttatggtgcctcacccagtggaaagtggaaagatattgccgatattgggttgaaagcggtgatgagtctgcaaagtgagattattgctattcagaatctcaaggcaggagataaaataggttatggcagtgaatatacagcgccaggccctatgcgagtcggtaccgtcgcctgtggctatgctgatggttatccccgttgtgccatgacgggaacaccgattattgttgatggcgttaggacccaagtattaggtacggtatcaatggatatgttatcggtggatttaacgccttgtccgcaggcccaaattggcagccctgttgaattgtgggggcaaaatttaccggtggatgatgtggcggagagctctggaacaattggctatgaattattgtgcgcattggcaaatcgggtcccggtatctataccctatggattttgaggtgcatcgcgacggcaagggagcgaatcctcgggagcataggtaactatgtgaccggggtgagtgagtgcagtcaacaaagaggcaacttgaaagataacggggatagtgtcaaatagtcgttagcgtttggtattattgcaggaaataagttaccgttttcgctaaattaatatctctttgtttcctataatcagtctatttttgtcagaagaattaggtgggagctaaacatatcgtgctttttaaggcaaaatagaacgttattacttggaaatgagggaaatgatcttttacacttgatatagctaatcgcataattgttttaaaggaaatagttaatcatgatcaacaaagctaaaattttagccacagtcgccgctttttgtctttcttcatctttagcttatgcgggacagtggtcaattggtgcctctgttttggctgaggcatcaccttataagggggtaaagaataaagataaagtgttgtttgttccaatggttaattatgaaagtgacaatttctattttcatactttagccgccgggtattatttgtggaatcaaccaaaagatcagctatctttagatgtctattactatcctcaaaatttccgcccaaaagataatgaagataagcagatgaaaaagctggatcgtcgccatgatactatgatgggcggctttagctatcgtcatattgaagattggggaacgttgcgtagctcttttgctgcggatacgttgggtaaaagtaaaggcataacgattgacctggcttatttatatgaatttaaaagtgatgattggtcattacaaccaggattaggtgtggtttggaatagtaaaaaacaaaatcgttatgaatatggcattaaagatagtgaatcacgccatagcggactagaaaaatataccccagatgatagctgggctccttatttggaattatctgctaattataaatttaaccaagaatggtctgtatttatgatggggcgtgttgagcgtttaccgagtgaaattaaagatagtccaatggttaataagtcatattcaagtattgtttggacaggtgttacatatagtttttaattacccacggcgataatataccctatgcatcttgaaatccgtagggtataaaagagctgccgggggaaggcagctcttttcagacaaagtaatgactcagttatttggaaatatgagcaatcagatccagaactttgttagagtaaccggtttcgttgtcgtaccaggaaaccagttttacaaagttatcgttcagagcgatacctgcttttgcgtcaaatacagaagtcagcttttcaccattgaaatcgttagatacgacatcatcttcggtgtaacccaaaacgcctttcagttcaccttcagcagcatctttgattgcatcgcagatttgttgataagtggcgggtttttccagacgtacagtcaggtcaacaaccgatacgttaggcgtaggaacgcggaaagccatgccagtcagcttaccattgagttcagggataactttacccacagctttagctgcgccggtagatgatgggataatattctgagcagcgccacgaccaccacgccaatctttcgcagaagggccgtcaactgttttctgagttgccgttgttgcgtgaacagtggtcatcagaccttcaacaatgccgaatttatcattgataactttagccagcggtgccagacagttagtagtacaggaagcattggaaacgatctcctggcctgcataagctttgtggttgactcccataacaaacatcggcgtgtcatctttggacggaccggtcagaacaacttttttcgcaccagcggcaatgtgcttacgtgcagtttcgtcagtcaggaagatacctgttgcttctgcaacaacatcaacacctacttcgttccatttcaggttagctggatctctttctgctgtaacgcggatagctttgccgttaacaatcaggtggccgtcttttacttcaacagtgccgttgaagcgaccgtgagttgaatcgtatttcagcatgtaagccatgtatttggcgtcgagcaaatcgttgattgcaacgatttcgatgtctgaacgttcttgtgcagcacggaaaacaatacggccaatacgaccaaaaccgttgatacctactttgatagtcatagtgttccaccagctattttttagtgaattaaaaattattactaaagttaccaaaaccttgccagccgtcaagcggaatcgtgtcaatagccgaaaaacattagctttgagttcatcatttagacgcttgctatagggtactggcaatcgagccgcccatcattatcaaggcgcagacagatattgaaagttaattggttagatatgcgagtcacatcacaatatagtaggatatacccgttatctttcaagttgcctctttgttggctgcactcactcaccccggtcacattgttatctatgcgcccggggatttgctcccttaccgtcgcgatccctcttgaaatccattgggtatagacagattcagttaaccgcttaaaataaatttcactgatgcaatgttaattttttgttattattaatcaattttattgagcacatgagtcttactattaaggtggtcgttatggctaagcatcctgaggtttccctttataaagaacttactgatattcagcgtcatgtaacccaaaatgccgggacagagccgccattctcagggaaattgctacataataagaaaagtggcgtgtatcattgtttgtgctgcgagcaaccgttatttatgtccggcactaaatttgattctggttgcggctggccgagtttttaccagcctgccactcatgatgcagtgcagtatcttgatgatgatagtcacaatatgcatcgtattgaggtgcgttgcggtcattgtaacgctcatttggggcatgtgttccctgatgggccgcagccgacaggagagcgtttttgtatcaactcggctgcattaagctttactgatgaaaatacaggcgaaaaaacagtaggttaaccgtttttagtattgcggccataatcttagtttatgcgaaaaatcgtttcagctaattctgaaaaataatgaggaaatatcaatggaactggatgatctgttatctgtaatgacaccagaaatatatcaacgcttggttcaggcagtagaactgggtaaatggcaggatggtgtgcctctaacggtcgagcagaaagagaatagtttacaaatgattatgctatggcaatcaaggcataaccatgatccgcaacatatgacgattggtactgatggtcagttggtgatgaagagtaaacaagaactgaaagcgatctttcggtctaaaatggtggcaacattcaagccataatctttggcaaattaggtatgaaaaggctgagtgtgtaaaactcagcctcgccttggattgatatcagagaagagcatcttctagttgagcaagttctatcaatatagcgccttgctcttttagctcttttaaggctgattggctatcatttggactcaggttaacccctcgacagccatccgtaatgacccaggtttcataacctaatgccagcgcatccagcgcggtaaatttcacacaatagtcagtggcgataccaataataaacagacgttcaatttgctgggtttgcaaccagccatcaagccgggttttattctgatggccgttgtcaaagaaagcactgtaactatcgatctgtggattttcgcctttgtggaaaatttcaacaattgcctgcttgtttagctgtggatggaaatctgcgccatgctgacgttgaacgcagtgtaccggccaccagacttgtggaataccgtttaatagaccgatatcaccgatcttctggccggaatttacggcaaagctcatatgttcagcaggatgccagtcttggctggcaatagtgctgatattgtgtttcagacaaatagccattgcctgatttgccgcaacaatgacttgttcactctcttctacggctaaagcgccgccggtacagaagtcgttctgtagatcaataagtaatagggctgttttcatctctttccttgattatttatcaatataacttaattcaccacgtaaattttgttgcattaaataacgaattttttcattgctataaggttggctaagtaaatagtgcaacttggttaaagttgcttcaaaagtcatatcgtagccgcttatcacccccgcttcagccagagcatggcctgttgcatacccttccatatttactcggccagaaatgcattgagtcaaattaaccaccacgatccctctctctgtggcctgttttagctcttttaataattcagggtgttgaggtgcgtttccgacgccatatgagcgtaggataagcgccttaaccggttgcatcaaaatattattcacaatctgactggaaaggccggggtaaatggtgattacgccaatgggctgaggggtgatttgatgagtaataaattcactgtgattggcaggggcagaacatgcattgaaggttttgatgttaataccagcttccattaatggagaacagtttggtgaggcaaaagcatcgaagccgtcggcatgtgctttgacggtccggttcccccgaaacaatttattattgaaaaacagactgacctcgttaacagggtaattagcggcaagataaagcgcattcaacaagtttgtctgcccatcagagcgcagtgcttccagcgggatttgtgacccggtgacaatgactggcttacccagattctcgaacataaaggagagggcagaagccgtaaatgccatggtatccgtaccatgcaggatcacgaacccatcataatcatgataattttctcggatatcatcagcgataaattgccagtcttctggggtcatatcagaagaatcgatcaatggttgatgttcacggatagtgaatgtgggcatttccggtcgatggaattcgggcatctttgttaattggtgctgtaagtgcccggaaacggggatgtatccctgagatgagtgttgcatcccaatggttccgccagtatagacgacataaatagatttcttctgcatgactgtacctcataaaaagatcagctggattatatacccgttatctttcaagttgtctctttgttggctgcactcactcaccccagtcacatcgttcgctatgctcccggggattcgctcccttgccgtcgcgatccctcttgaaatccatagggtataggagtattacaaaataaaaaaagcctgacagggtttgtcaggctaaattaatcgagctattaactagaatcatgcactgtgataggttgcttagcgaatatctccgcaatttaaacagaatgcataacgattttgtggatcattcagatggcgatagaactcactctgttgtttcacttcctgagctacctgcaccaatggcgcgggtagccaggcttgaaccgcttccggcacgatagcttgtgcggttgttgtcaactggctcatcagcaactcactgaatgacatttctggttgcatccagtcaagctcagggttatccaattttgctaattcagccgctttggtgaccgcatcatcgaaatcccctaattggtcgaccaatccattggttttcgcatcatgaccaatccacacatgcccctgagcaatattatcgacttcttcgcgtgttttatggcgcgaagtagcaacaaggccaataaagttgttatagccgttctcaatattaagctgcatcagtgctgagaactctttgctgagccctttagtaacagaaatacccgcgagtggtgtggtagaaacgccatcagtgtggataccaatatgttccagactgttttcataagtggtgatgacaccgaagataccgatcgaacccgtcaacgtactttggtttgcgatgatgtaattagccggggtcgcgatccaatagccaccggatgccgccattccccccatagaaaccaccacaggtttattcgttgcacgtagcgcagccagttcggtgcgaataacatctgaagcgctcacgctgccgccagggctgtttactcgcagaataacagctttgatattatcatccaaacgagcttgacggatttgagcggcggttgtgtcaccgccaaccatgccttgggtctgctgcccatcgacgattgccccttgcgcgacaataacggcgatattgcctttagatgataacctgccttctaccaattgcggtgcataatcataaatgctgatagcattgaagtggcggtttttttcgtcccaaccaaaggcttttgtcatgtcactttcaatgacattgcgtggcgcaacgtaatcgaccagcttgtgtttaagcgcatattgcgcattatctccgccaacagcacgtaagctggcaatcatctcattagcgcctgggaatacctgatcaacagtgagtttgcggttggtagcgacagtattgaggtagttgtgccacaggccgttgatccaacggctatcagcttcgcgggcagcgggagacatatcatcacgcataaccggttcaacggccgatttatacgtgccgacgcggaaaatatgcgcggtgactttcagcgaatccagcagggatttgtaatacaggctattggttgaatagccataaagaccaaccgttccttgtggtgatagatagattttatcggcaaaagtcgccagataatattgtgactgattataactatcactgatagcataaaccggtttaccggaagttttatactcattaatcgccttaccgatatactgcatagatggctggtcggcaccgatgaaatcatcaagtttcagcaccagtcccgtgattttgttatcggtttttgcttggcgaatgctatcaacaatatcaaacagggagttttcctggaatttattgctggatgtaccaaacaactcacggcctaattgagtcaatggggtacggttggagacctgatccacaataacaccggtgagattgacatataatgctccttgataactatctgccgttttgtttgtctgttggtaaagtagaaaactgccaaccaccaccagaatcagcatgataaaaatcaggtttgaaatgacttcccgaataaaatttaatagtcgccaactccatttaaataatcttgcgatcaacttccataaaatacgcatatcatctccaaaaataggatcaagtgaagctatcctaatgatcagacatgtaaatgtcagcttcaaatagtggcatattgcctgaaaagacagctttagggcttttatttgttaacaaataaacagaaaatgttagcttataacaaaatacattacttaggagagaaaagatgaatgcattagaacttttgttgaacagacgttcagtatcacgtttaaccaccccggcacctcaaggtgaagcattacagcatattctggcggcgggaatgagagcacctgatcatggtgcattacgtccgtggcactttattgtcatgcaggatgacggtattgagcgattcagtcgattactccatcaagccgccattgatagtcagcttggcgctgaggcggaagaaaaagcgaaaagtgcgccttatcgtgcaccattaatcatcgctgttattgcaaaagtggtggagaattccaaaatacctgaatgggagcaggtggtttcagccagttgtgcggtgcatgcgatgcaaatggcggctgtggctcaagggtttggtggtatctggcgtacgggttcatggactgatgataataccgtgcgtaccggtttgggttgtcatgaacatgacaaaatagtgggttttctctaccttggaacgcctgcactaaaagcacccaataaggtgactgcgcctgatatgaccaattttgtcagctacttgtaaccggggtctgttatgtcaacagaagttcgtcttacccaatacagccacggtgctggatgcggttgtaaaatttcaccaaaagttttggaaaccattctgcatagtgagcaggaaaaatttcttgatcctcacttactggttggtaatgaaacccgtgatgatgctgcggtttatgatattggcaatggtaccggcattatcagtacgacagatttcttcatgccgattgtcgatgatccatttgattttgggcgcattgctgccacaaatgctatcagcgatatttatgcgatgggcggtaagcctattatggcgatagctatcttgggatggcctattgataaattagcgccggaaattgcccgtaaggtgattgaaggtggccgggctgcgtgtaaagaggctgggattgtactggcaggagggcactctattgatgcgcctgaacctatttttggtttggctgtaaccggtatcgttaatattgaccgagtgaaacagaacagtgccgcgaaagtaggaagccagctatttctgaccaagccgcttggaattggtgtattgaccaccgcggagaaaaaaggcttgctgttacctgaacatcagggaattgcgatagaaaccatgtgtcgcttaaataaattgggaatggattttgcggaagtggctggcattacagcaatgaccgatgtaaccgggtttggtcttttaggccatttaagtgaaatttgtgcaggatcgggggttcaggcaacactccattttgcaaaagtgcctaaattgccggaagtggaatcctatattgcaaagggttgtgttccggggggaaccgggcgtaactttgatagttacggtcatcttattggtgaaatgacagaacttcagcgcaaactgttatgtgatccgcaaacctccggtggcctgctgttggctgttctaccagaagctatggacgaagtgaaagcgattgcacgatgtcatggcatcgaactgaccgcgattggtgaattgtctgagcaacagtcaggcagagtactcattgaggttaatgaataatacccatgcggctttttattgcagaaaaaccaagtctagccagggcgattgccgatgttttaccaaaaccgcatcgccgtggtgatggctttatcgcttgtggcgataaccagtttgttacttggtgtattgggcacttgctggaacaggcggaacctgatgcctatgacaatcgctttgctcgttggtcattagttgatcttcccatcattcctgaaaaatggcagttaaaaccgcgaccttctgttgagaaacagctcaatattatccagacgttgttggaaaaagccgatgaaatagtgcatgccggtgacccagatcgggaagggcaactgttggtggatgaggtgctggattttttgaaactggatgcagtgaggcgaaaaaatgttcgccgctgtttgataagtgatctaaatccacaagcggtaaccagagcggttgatcggttaagagataatcgggattttattccgctatgtgtttcagctctcgccagagctagggctgattggctttatggcattaatatgacccgtgcttataccttgcttggccgtaatgcggggtatcagggggtactatctgtcgggcgggttcagacccctattttgggtttagttgttcgccgggatgaagagattgagcatttcgtacccaaagatttttttgaggtgaaagcgcatattgttacgccgaaagatgaacgttttatcgctatctggcaaccaagtgaatcttgtatcgattttttggatgaagaagggcgattgatacaccggcctctggctgaccatattgttaccagaataaccggtcaaccagcctatgtgatctcttatcaggataaacgggaatctgaagtcgctcctttgccattttcattatcttctttgcaaattgaagccgctaaacgttttggcttaaatgcgcagcaagtgttggatatttgtcagcgattgtatgaaacccataagttaattacttatccccgttctgattgccgttatttgcccgatgaacactttgccggtcgtcatgccgtgcttaatgcgatatctattcatgcaacaaagctgttgccacaagagttactggaaatagatagaaagaatcgttgttgggacgataaaaaggttgatgctcaccatgcaattatccctacagctcgaagtagccatataaatctgacggatagcgaggctaatatttatggtttgattgcccgacaatatttgatgcaatttttcccggatgccatattccgtaaatgtgttattgaattggaaattgcgggtggaaaatttattgctaaagcccgttttcttgctgaggcaggttggagaacgttacttggtaataaagagcgtgatgaagagaatgacggaacgccattacccgttgttgctaaaggtgatgaattattgtgtgaaagaggagaggtagtcgagcgccaaacccaaccgccaaagccatttactgatgcgactatcctttctgctatgaccggaattgcccgttttgtacaggataaagagctgaaaaaagtccttcgtgcaacagatgggttgggaacggaagccacgcgggctggcattatcgaactattgtttaaacgggagtttctttataaaaaagggcgtcatattcatgccacacctgcgggtagggcgttgatccatgtattgcctgatatggccgctttaccggatatgaccgcccattgggagtcgcggttaacgcaaatcagtgaaaaacagttccgctatcaagatttcatggggccacttgaggagacattgcagcaattaatttggcaggccaaacagaaccgtaatttaaccgcttttcgtgatttaccccccctcccagtgaaagataaaaaagggaagaaaataaaagcaccgaaaaataccaaaagagctgcgccatagcgcgcagcaattattacattattttaaaaacgattgatattcggtgttaacggaatatcaaatttcaaattctgcccaaactggggcatgatctgacggtttttccatctcacggattttatagtcaatacctgttgcgatacagcgatccatcaaaggcttacttgcaagcagtaaatcaatacgtagccctcgattatcatcaaaccctttggaacgataatcaaaccaggaaaattggtcgttacattcaggattgagatggcggaatgtatcaaccagaccccagtttttcaggcgatccatccaatctctctcttctggcagaaaagaacatttacctgtttttaaccagcgtttttggttgttctcaccaatgccgatatccagatcggtcggactaatattcatatcacccatgataatcacgtgtgattgaggggttaagttttgctccaggtagttttgcagatcctgataaaatttctcttttgccggaaatttcactggatgttcacggttttctccctgtgggaaatagccattaataacggtcaataatccgtgtggggtttccacttctgccatgataacccggcgttgagcctcttcatcatcccctggaaaaccacgatacaccgcaagaggcacctggcgcgttaacagtgcaacgccgtaatgggctttctggccgtaataaaatacatgatagccaagcttcccaacctcttctagaggaaacgcttcatcatgaacttttgtttcctgtagaccgataacatcgggttgatgttgctcgatgatcgcagctaactgatgggggcgggcacgtaatccattaatattaaaagagataaatttcatcttttacagccatccagtaaaaagacacaggaacaatagtaacagatggatcttaaaaagtaactattgacaatggtcagcacgaaatagtaacggatcccctaatattataatttgctgtgaaaaatataataaattgtggtgagaaagagcctcagttagaccgtttttatctcaagtgttacaaaaattgattactgaaaaatgtagaaccctatcctaatctttgatagaaaattgagctcgttagtaatgtttatattttctaatggttgattggttgagattaatttttgaaccatgataaacatgaataatagagtttattgagccacctatgtattgaacatacgctttttttatgtggtatatgtttgagaagtatttgtttttttgtacaaaatttatgccttcacagtatcaaacttgatttagctgtcatttggtgaaggctatttcaaagaaattattttagccacaagttatataggaacggtgaattatgtttttttctcgtaaattagaagcattcatggcagtggtggaaaatggttctttaagtaaagcggcaagagtgatgaaccgtacaactcccccagtagctaaatcaatcaaagacttcgaagcaacattagggaagcgccttttcaaaagggagaaatttgggatgagtctgactaaagatggtttagaattatataatgatcttaaagatctttatttacaagaaaaagaaataactaaaaaacatatcagtggtagtatatgtaacatagttaatatttattacgattgggggaaaaacaaacatcttatttatttatataaggcagctgatagaaatagctcacaggtaaatatattccggtttagttatgataacattgaagaaatagtggattatgacggcaacacgctcattctgagctcagaaaagatactaagtgaccgttttagtctcattcgcaaaataaaagggcctgaattgggaatttgctgccgaaaagagttattagatattgctaatggcgatgtgatgcaattgctaaagagtaatacttggctatgcgatcctgtactttataaaagtagcttcgttaaaaacttggaagaagaagttattcaaagtggtggaaaagtaaatatgcgtcagatggataatatgggatgctgcatgaatttcatttattccagagattatatatttattacagattctcatcctgatgaattggaaggaggagacgctttgagttttgttcccattgaaaaacctggcgcagcaaatcaatgttatatttataagtctaaatcacactcaagtgttcttaatcgttttatcgattcagttaatgacatgagttaaaattcatctacgcggagaggattattgtaagctccgcgttgttaatatgcggagataattataaagatttttcactgtacctaaatgataaatttatatttataattcttatttgaatattccaagtgaatgtttgatcgtggtgaggaaaaatggactgttcctcgccttttggagcaacttgtacgacaaacctgacattatattcactctcgtctggtgtttggcacagcccattgtgcatgcacaaatctgcatggccttggttttactgctttagccggggtgttgtggtactccaaaaaataatgttagcccccaagtcgttttcggcaaaattagtaaactcctcctgagtgaaggcttttttagtttttggattggtgtaggtcagtgtgggttcttggactgccattgccaccaaatccagtttgcctttgtaacgattgaaaaagggataagtgtttttcatttgagcagattgatatggcacgatatcgggaccgtcgagaccgatcttatttttcgacgcgaaattaaaaaagcgagacatatactgatgatcgttatcccattcacatggccagaaattaacgtattgtactacgtaggattgtagaattttttaaatacctggcgggcgaatttgatattatcaagttcggcggaaaaatagcggtcacggctaaaaccggtcttatcctgtttcatgtcaatatcaacggcggtttctggtagattaatcccggtaatacggccgtcaaactcttttaccagttcgaaaagcagatcctgatagcgtttgcgcaacgctgtattccattgaatagcaatccaaccataaccttgtgctttgccttcaccgggattatcaacttgagcaactaaaccgccttgatattttgtgccttgttagagataaaatggcataaacaacttgtacaccgtcaatattttgacgttctaacagaggacataattgatcgagctcatcggatgaagtgtagagatagttttgtggttttcctgcgagtgcatcagttgacaataaactaaaaatcagagtggctaagatgagttgttttagcaccatgattatttccctccttaattgtaagggaacgagtaaccggcttatggcagtttaacaaaacagatagttccatgactttacgaatttatttaacaccacaaagttactttattgattaattggtaattattttccgcatcttagtactcatttatccctatctttgtaaataagttctcattaaaaacaaataagaatattattaattaatataattttattaggattgttgactgttttttggaattatttagttgtttattgttgaagttcaataaaaattaaacgaacggcattttgtgataataaagtcttgactttgttatcagataattaaggggattgtcccatctataaataatttatcttgctgtagaagataaggaataaatggtgggcatatcagcgtaaaatataatttataccctatggatttcaagatgcatcgcgacggcaaaggaatgaatccctgagagcttgttattcgcataacatgaatgagaattattcctttttacagcgattttatgaatgatatttaaaaaggaataatgagatttaaattaatgcaacgtgttgaataataatgaaaatagtatatttctctcatggggtgattatctaattataaccagatattcaactccatttcattttatggcaaccaatgcaagcttatttttgtcagtaaatgtcatgttattgttatggggattaaatatcctgcccgatacgttgttatatcgatggcgatagagtctgggcattaaaaatcgtatttttttgaaaaaaagagttgatctttatatacacccattaagaggataggggaattaggcaatcgcttattttgttcatgtgttggtgtgttgcgaaaagatgaggagtcaatgatgaatgaagcgaaggaaaatgagatttaccttcatcctgaatatgatgaatgtggtcgtccgtactacaacgtatcattttcctgccggggtaatggagagcaatctaaaatcgaaacgcgatgatgagccagtctggttggtaaattctgagattggcgttgcaagttggataatgaagaatgcttcttataggaaagagacgttagatcctagtaaatttgattgtgctttgataagcaattatgcagaataatgtaaggtagtgcggaaggcgatatgtatactgtattcctatatacttatcccacagacagatcaaagggggtcacatgacagtaggaatgacaacgttagtaacgttgctaactccacttccagacgttaatcagttagcaaaattgccagagtatctttctgctccgattacgcaattggtgcaagacagagcagggcaaaaaatgctgactgctcaagaggtgatgtcatatttctctgaatctaaaatggcgcttgcctacctgaaagaaaatacccaaattggtattgaattacttgaaaccattgaccgtgacgggatcgaaccaggtatagatattcgtgatgtagtcgagcgttacgaatccgctgcaaaaatcgccacgagtcaactccatctcttgaaattaagttatattcttgcggagtcttcgcctgcatggggaccgcatgtcaagctattccaaacgcattctcagagagcgttgaggatttttgcaaataatagaaacgttttattgcgtattgcaacaatgttaaagcagtacttgccagttaatgcaggtgaatatacaccgaaagccgacgcggaaagttacaaagagttggtgaatctctcgcataaaaagctcggtattccattgcctgtgtggggttaggtatatggtttacgtcagcgtggcggaagagctacttttcaatgcggctgctcatgattacgcaaccatgttggttaaatatttgagtggtgcagaagaggtgtctggttggctgggtgccaagggcgttttgagcgcaacatgcaggctatggaatcaggaatatggaagttacatattcttcccctgaatgaaaaaccgtggccgacaaatgtgatgctacacaacaggaaaagtgacaattatctggtttatgctcaacattggtattatgaaaatcattatcaggtcatggccgtggtgatgccagatgcacattcgcgtattgataggctcttggataagctagggtgtgtcccgcaataggctgagatagaataatctatgtggctctgactttcggaaaaaacatgttatggctcgttacgaccttcctgatgaagcatgggagttactgctccccttattgccccctgaacattctcaacgggcgggacatccttatgttgaacaccgccgggttatcaacggcatgttttggatactctgttccggtgccccctggcgggatttacccgaacgttatggttcctggaaaaccgtctataatcgctttaatcggtgggcaaaatcggggctcattaacctcattttcaataagttattgtcaatactggatgaacaaggtttagttgattggtcagctatatctctggatggcagtaacattcgtgcggcacattgtgcggcgggcgccaaaaaaaacatcccgatgtcaccgaaaatcatggcctgggtcgctctcagggtggttatggctccaaaatccatctggcggtcgatggaaaaggctatccactgaatgtggtactcagtgcaggtcaatgtcatgaaagtcaatatgcagtgcgcctgctggatggtctgggtattcagcgtaaaaacggttttatgaaacgtcgttcaaaagcggtgattgctgataaaggttatgccagccacgcattacgtaaccggttaaaaagtcagggaataaaagtgataattccctataaatcaaatgaaaaagcgcggtcagatggacgggttaaattcgaccatgaaacgtatcgaagaagaaatgttgtagaaagatgttttggtcgactcaaagagcatcgtcgcatcgccacccgttatgaaaagacagcaagaaattatatcgctatggtgaaattaggttgtatccgcttatttcttaaggccataatttaattgagggacataacctagttcatatcgtagaagattctttccagtgtctaaatgagcgggaattaaggctgcttaatcatgtaagcgcatgaacccatttactaagaaaagcatatagacctgctccggcaggtttttttatggagttttcacaatgccaatctattggagataagtcaggaaatatcgtaatcactaactactcttattaatagtttaggcttagcactcgcggtgctttaccgtctatgcagtagtaaacttaaaaatattctattgaagtaagaatctaatttgaataatatcttatggctatttggcagtaagatgaaattacctttattaataaataattaagtgaggtgtttatgtctgaaattaataagccagaagttactgaaatagaaaataaactccctgagcataaatcattaaaccctgatcaatacaaatgtaatcatgttgttgccccagaaaattcttgtccgtgggcgattattcaagtgtatctaggaaatcaagcacgtcgtggtgattgggattctcctaatgaatgcatacgccttattcctgaatcgaacgctaacagtgaaggcaataatctgatttatattgagaagtgcgataagcatgggcattggttaccttggcaaccaacgccggaagatataatgggtagtgattggtcattgttagagccagataacaatatgatggtttttgatgttaccttagggactagtaagtatgatacagggcaggactggggatatatgagtgacaagggagtctttggtaagggagaatctactttcggtactttaaatataacccaaaataaaatagatattaaaagcattttaaggttctactataatagcagcggattgtatttgagagtatattttgataaagctaattatcagaaagttaaagaagtactcaagaagaatttttatgtctcagttgataatgtaacttatgattttggaactttcttgcatgatcatgatgcagataacgataattatgaatacgatgtctactattatgaatcggaaaacccaaccgtagaaaaactaggtgccatattaaagcagacaggtgaaaccaagcgtttttactgtaactggcgttaactatattacattgaattccaggctgcgcattgcgtggccttttttcgttttaaaggccacctatgtaaatattttcagcgaggcaagagagcggaaatattctgcttaactgagatcagtttatgcataagaatagaggataatcttaatgaagtacttaataagcatttaaggttattaggcactcgcaacgatgatgattctaaagttgtccgacctgatggttcgtcaggacgagttgatttgatgttaagtaaatcaaaaggctggctatctcatcattcacagagaaaactttttgagcatggaaaatagctggaagtactaactccaggtcaaggatggcaaatttaaaatagacccacatgatatataatgctgtatgtgcgccattgacttatcccgccaaagcgtatactatcacctaaatgtacaccagtgacgcactaagacatgatatttattgagacccatatcttcactgaagattgtaaagagttgttaagtgacgatgaatatcgtgaatttcagcaatatctcgcagacaatcctattgctggtgatgttatccaacacactggtggcttacgtaaagtcagatgggcatctgggagtaaaggtaagcggggtggtgtgcgcattatttattactataaagtagatgtctcacacatcagattgttactgatttacaaaaaaggcatcaaggatgaccttagtgaatcagaaaagaaagtcttgagagcactaaatgaggggtggtaacaatggatagtaaattattttctagactaactgaaagcatgacacagatgaacgaaattattaatggcgaacgtgctgcctctcgtgaaactcacgttgaagcagtaaaagtaaagaatattcgccaggcaaccggtttaactcagaccggttttgctaagttgatttccgttaatgttggaactctgcgcaactgggaacagggaaggcgtgagccaaccggaccagcaaaagccctgttgaaggcaatagagaaagatccggttcatgttttaaaggcgttatctatgtaaatagagcgcataggaattcctcagcctcgtttcagcgaggttttttatgggggaaatagggcagaagaatttaaatggagaactcagatacagaatacctaccgctttgacaattaatgcaacatttgagcaggcatttcagcatgaatatcacatcagacgtacaaaaattagaaccgggtgaaaaactgggttacaccgataaaaaagaatgtcatgaatcatgatcttttcttattaaagcggcccataacttgctgaaatgagccgtaaagaagtggatgaaacccgcttgtatgctgtttaatttaatggaccatccattgatggggatttaatcattttttaaataaaaatcatcattatctcttagccagaaaaggagctgtatataggatagttgatatccaaatgattgcggtgataaacataacaatcatcctggtgaaacgccagtaaaatggctttggcggtgtagcgatgggaataggtaattgagtattttggagctgacgattatcttgttcgtcatcttgaagtggcaggataaaacgataaccttgtcggtacaccgtgtgtatggcttcacctagatcacaataacgtaatgttcggcgtaacttgcagattaattgcagtaaattggtttctgctaccccatctttgcgttcaggccaaactagagggatcagttgctcccggtttaacgtattcccttgggatgcatgttcccacagtgcaagtagcaggcgtttctctttctctgtaatgataaatatatttttaccatgaattattttgtttgagtcacagtctaaataaacatctctagttattttcaacataacgcattctctgcctctgtttagtgtttgtctattttttatatagccaggagggctcaataggcacttatacctgttagagtttatatattttatgaatgagtaatgcaagaaaataaattatttaaaattttttattttattttgtcatatgggttatttttctgttttttattaagaagtaaaactaatgataattaattattagttttataccctatggatttcaagatgcatcgcgacggcaagggagcgaatccccgggagcatagaaaactatgtgaccggggtgagtgagtgcagccaacaaagaggcaacttgaaagatgacgggtatatattatgttgaattccaagcctcttacttgcggagtttttcatatataaagtccacttccacgttctcagataatgtctgatgtggcattcaatttcaactaccgagtaatcctcggtagttgataagtatttagcagagaatgaagatgttactttctgcgtagtgaagtttgagctatattgaactaaatcttcttatatacgagagatatatagctaactcttaagaatctttatatccaattaaactcagcttctgtggttagagttgcgtctaaattgacggctgtaattctatagtaataaacagcgttaggaggcgcgttgagtattttagtttctccaggccagacatcaatagaattatagaattcatactccccaaatggggatgcccagaaatttaaaaccctcattgctgcttggccgttgttttttattgctatacttctccatcgaataggaatggctatattcccatttttataagcttcgatagcttggttagggtttaggaatattttgaaatttgttgatatcatattggtttccttattattgctgttatttgttggcatatataatcaggtgatttcacctgtgacatttaacttaacactttctatgagcagttaaatattgaaatttatcagtgacgtaaaaggaataaggtaaacgtaaaagcggttaatacacattccatgctacgcattgcgtggccttttcttttttcacacacgtttaacgggatcttaatttctagttggggtggaaatatgaaattcatggacaagccgattgacatctggatgtagctatgattatggctgttatcagtcaaagagatacgaaaatcccgacagtggcggggacatgtattcctgacggatttattgccgatagcggtagtcgtaattaatgacgaaggagttacaccgataaaaaatagataacttaatatcatgaatcatgatcttttcttattaaagcggctcatgacttgctgaaatgagccgcaaagaaatggataacccgcttgcatgctgtttaatttaatagaccatccattgatggggatttaatcattttttaaataaaagtcaccattatttcttagccagaaaaggagctgtatataggatagttgatatccagatgattgcggtgataaacataacaatcatcctggtgaaacgccagtaaaatggctttggcggtgtagcgatgggaataggtaattgagtattttggagctgacgattatcttgttcgtcatcttgaagtggcaggataaaacgataaccttgtcggtacaccgtgtgtatggcttcacctagatcacaataacgtaatgttcggcgtaacttgcagattaattgcagtaaattggtttctgctaccccatctttgcgttcaggccaaactagagggatcagttgctcccggtttaacgtattcccttgggatgcatgttcccacagtgcaagtagcaggcgtttctctttctctgtaatgataaatatatttttaccatgaattattttgtttgagtcacagtctaaataaacatctctagttattttcaacataacgcattctctgcctctgtttagtgtttgtctattttttatatagccaggagggctcaataggcacttatacctgttagagtttatatattttatgaatgagtaatgcaagaaaataaattatttaaaattttttattttattttgtcatatgggttatttttctgttttttattaagaagtaaaactaatgataattaattattagttttatttatattgtgatgattacccatgaagtgatgtaagatttagaaatatagataaaatatttttaggtgttatttattgtttataaattccttttgtaaaaattaatgaatagatatccacgagcaataatgctgtgaattgaacgtgatttatttatgtaattgaattaaaaggtaaaaaatagataaaaatcattattttttatttttaacttttatttggcggtatttgagtgattactgttcgatgaatagtttaaagctccaacagtgtgatgtttatcacgtattaacttacgttaatcagtagttagtcagtagtcaggtcgcctcattccttgaaccttgaatgagggtttggatattaaagcacagtgaatatataccctatggatttcaagatgcattgcgacggcaagggaacgaatccccgggagcatagagaactatgtgaccggggtgagtgagtgcagccaacaaagaggcaacttgaaagatgacgggtatacaagtaaggcattaggcatgatacctaagggcggtagcgtacctaaaatgatatgtgttctaacccggttatgaatttaactcttaaggaaataacaatgtctacaactgtcgatcaaattgctgttcaataccctattccaacttaccgttttgtcgtgaccgttggtgatgagcaaatgtcttttcaaagtgtatcgggattagatattagctatgacacgattgaatatcgtgatggaattggtaattggttacaaatgcccggtcagcgtcagagaccaagcattaccttgaagcgcggtatttttaaagggcaatctaaattgtacgattggattaattctatttcgcttaatcagatagaaaagaaagatatttctattagtctcaccgatgaaacaggctcaaatttgctgattacctggaatattgctaatgctttcccggaaaaactcacagcccccagttttgatgcgaccagtaatgaagttgcggtacaggaaataagtttaaaagccgatcgagtgactgttgagttccattaatacactgtttggtgtcaggactgtttgttgtcaggaatagtctggcacgtcaatgcagtgctttttaaaggcgaatattatgacaacttatcattatccgggtgtctatattgaagaagatgcttcattggcactctctgtccgtaccagtgcaacggcggtccctgtttttgctgtcggagatgaaaatctttttaggtcaggagatgactatcatcgtgttaatagttggctagaatatctggctctaagaggtagacaatttaatcctagtgataagcttgatatttcactacgtgcctattttattaacggcggtggatattgttatctcgttaaaactaaagatttagtaaaccaagttccaaagttggatgatgtcacattgctggttgctgccggagaggatattactactgctgtaggtacactttgccaaccgggcaaaggcttatttgccatttttgatggcccagtcactcaaatagatttgaaccaaaaacccgatgaagtacttaagatttataccgctaccgcctatggcgcagtttattatccttggctgaccgctgagtggggagaaaaaaatgaagaagggaaaagagctagcgttgatattccacccagtgcagtgatggccggtatttatgccagtgtcgataacaatcgaggtgtctggcaagcgccagctaacgttgctattcaaggaggattacaacctaaatatccggtgactgatgatctgcaaggacaatataacaaagataaagcgttgaatatgatccgtacttttcctaaaagtagcccattggtttggggagccagaacacttgaggacagtgataattggcgttatatccctgttcgccgtctgtttaacagcgcagaacgagatattaaaaatgccatgagctttgcggtctttgaacctaatagccaaccaacttgggaaattgtacgtcgagcgattgataattatctctattctctctggcaacaaggcggattgatgggcaataaagctgaacaagcttattttgttcaaattggtaaaggtatcaccatgactgatgacgatattaaacagggcagaatgattgtcaaaataggtttggcggcagttcgtccggccgaatttattatcttgcagtttacgcagaacatcggacaataattggaggcagtatgccaacagtaccaacttatcctggcgtctatattgaagaagatgccccaccggcgctttctgtcagccaagggaatacggcaatccctgtttttattggacgtttttcactgaaaaaacctagtacgactacgacaccacaagtgacacgtgttagtagctggttggatttcactaacctgtttcatgtgggttgtgttacgtcaatagcgattaaatcaacacctccatctgccgctaaaaaacctaagaaagttgaaaaaattgaaggtgatatatcaaccgaaaacaaagccaccaaagaaaatgaagaggttaatagcaatacagaaacagaagaagaaaaaaaagctgattacacttatgaggtgactgtcggtacctatacaacaagcagcgatgccttaaaactttatttccaaaatggcggtgggccttgttatatcctaccgattgctgattcggaagatactaaaactctggctttaatccctgagttaattaagcaggctttagaaattaccttgatcgtctgccctgaacaagattctgattaccaaagcaagatatataacaacctgacatcttcattattgaatgagggctatttccttatcgctgataatcaggataaagcattcgctatcagcactaacgtatcctcacaaaccgcaacgtattatcccgcggtgaaagtctcacaacttatgcaaacggaagagagtcttatagatgttttaggttataaggatgcaaaagcaaacaatattaccaatttgacggaactcaaagagaaaaacccgaatgtctataaggaggctattactgcaataaagaatgtaaacaaaactattcccgccagtgcaatcatggccggcgtctattgtgctactgatgccagccgtggtgtctggaaagcaccggctaatattgttctgagtggcattagtgatgtagaagaacggctcaccgaagatgagcaaggtaccatgaatcaaaaaggtatcaatgttatccgctatttcaataatcgagggtttgtcgtgtggggtacacgtactctgaaagatgatgacaactggcgctatattccggtacggcgtttatttaatgcggcggaacgggatatcaaacaggcaatgcgatttgccgtctttgaacccaatagtcaaccgacttgggaacgagtaaggtcagccattgacaactatctccatcaactctggcaacaaggggcgctggttggcagtcatccccaagaagcctattttgtccagattggtcaaggtgtcaccatgtccgaggtggatattaagcaaggaagaatgatcgtcaaggttggtatggcggcggttcgcccggctgaatttattatcctgcaattttcgcaaaaagtcgcacagtaactgtactggggcgcggtttgccgcgcctgtcctgttgaggaaatgataatggaaataacacagccgggtgtgacaagcgcggaaaacctgatatcccagaagccgggggatgcatttattggtgtaccggtttttattggtgatattccaaaaagttcgggcagtaaaaccatagtcaaattaaacagcctgaccgattttaccctaaaattttgtgagtcaggattaatgtacgactcattaatgtacacctccgtgcgccacttttttgaaaatggcggtcaacaagcctatgtgctgccgctgacccttgatgaaccactgagcgattttcaatcattgatcatcgcactgcaacaggattggcttaagcaggctattgccgcggagagtgctattacactggttgtcgtccctgatattgtccgttttaatcagacgggagagtccggtgccgagatagatctttggttgcagttttggcagtcgatactcgaactgtgcaagagccgacgtggcatcatgggattgctggatgccccggatgatccggtactggccgcgacatgtttggcgcagttttcctcaagtgatcggcaatggggcgcggtatattggccggggctgaaaaccacatatcaagaaaatggtcaacatatcatcctttcgcctactgcggcggtggcggcggttatccagcgtaatgatcatcaacaaggtatctggaccgcaccggccaacgtagctttagctaaggttgtcagcccagtacgatcctttattgaagctgatgcgctctttaatcagaatggcacttcgttgaatctgattcgcagcttccccggcaaagggattaaagtctggggatgccgaacgctggataacatccccggttctccctggcgttatatccaaactcgccgattggtctcctatatcgaagctcatctcacccgattaggccgggcttttgttttcgaacctaacaacgctatcacttggatgaaacttaaaggccaaacttacaactggctgcatcaattatggttgaaaggtggactgttagggacccaagaggaccaagcatttgacatattactcggtgttaacgaatcaatgaatgaagcggatctgcgggctgggaaaatgattatgaaaatcaaactggctctgctcattccggcggaatttattgagctgagtctgacgtttgatacgcgcaccgggaccatgggattaaattaaacaggggcaaaatatgcacaatctatacaccccgtcagtgtcacaccgttttatcgccagttttctgtttaacaatattcccagtccacttgatattgcctttcagcgcatatcggggctcagtcgtgaactgcaaactactcaacacagtcaaggcggggaaaacgccagaaatgtttggctggccgagaagatccagcacggtagtttggtattggagcgtggtgtgatgacgattacaccgctgactctgatatttgatcgtgtcttgcgtggggaaaaagcggtttatgctgatgtggtcatcatgttgctgaatgaaaattttttaccggtggcaagctggaccgtgagtaacgcgttaccggttcgttggtctaccggtgactttgatgccaatagtaatgccgttttggtcaattccctggagttacgttatcaggatatgcgctggttaggagtgaaagcatgactgtagaaattaaagaactgattattcaggccaaagttaccgattctgcgagtgatttatcttccctgcgaaccttagctcaagaagcactggatgacgctcgcctgattgagagggtgaaacgggaggtgttagaggcattacgtgaaaccgggggcgattatgagcttaattgaacgtagtctgtccaaattgacgctgacggcttttaaagatcgggaaggtaaaatcttggtgggcagtttaccggtgatgtataaccccgatgcgatccagttcaactatcaagccaattatagaaacgatgaaagcattacccatgcccaccaaggcaaccattatgtgtcgtctcagcccgcgggcttgtcattagatctactgtttgatgcctctatgcccggcaacaatacgccgatagaaacccaactggcgacactgaaaaccctctgtgccgttgatgccggtaccaacgtccctcattttcttaaaatcaagtggggcaaaatgcgttgggaaaacaaaggttattttgcttgccgggccagcggtctcaacattcattacaccttgtttgatcgggatgccatgccgttacgggcaattgccaccttatcgctggtggcggatgagagctttattattcaggccactgagcagcagttaaaatcaccaccggctactgcggttagcgtaaccgatatgctctctctgccattgattgcattgggcgctggcgcggctctggcgggcggtatcgattatctttcgctggcttggcaaaacgatctggataatcttgatgatttcacgccgggacaaacgctacaagcacggagaaaggcatgaagatacctccgatcgcgattaagataggcggcaaaacgctcaatcagtttacagttatcagcctgtcagccaattaccctatcaatggcattccttcggctaacgtcactttgggtattattggtgattccagccatatttttgatgccaaggtgcaggctgagttagcaaattgccgcccgaaccatgaacttatcgtgcaaatgcaagaaaccgtgttgtttaagggagtcatcgttcggcagacactggggcttaaaggtcaggacagtttaatgattctgacggcaaaacatccactgcaaaaattaacccataattttcactcacaactgttcagtaagcagagtgatgaggcgattatcaagaagctatgcagtcaggctggggtacctgtcacgataaaacaggcacctcaacttaaaacggtacatgagcaaatggtgcagtttcgttgcaatgattggacattcttaaagagccgattgagtgctaccaatacctggctgatccccagccatgatgttgttacgttggtcacgccggaatcacttaatcggtcaactgtccacaccattcgtcagcgcggcgacctccgggacattgtgctgtttgaagcgaatttgcaatgggataatcagcgcagccccaaaacggtgagtgtacagtcttgggacattaaccaacaaaagttgtctcaggcgattcaggtaaaaaatagtgggtttgggcatggtcaacttgctaccgacacgctgaaaccgctgaccgatcaagagtggcaatggattttcagctccccattggataatgaacaaaccaaacagtttactcagggcatcatgggcaaccggcgaaaccataatatatccggcagctttgaggttgcaggccatgattgctatcagccgggtgatgttttggcgttaactggctttggggcgggaatggatggtcaggcgattatcactggtgtcagccagatcattaacccgcggcaaggttggcgtacccggttaacgttaggcatgcaatcagatatagaacaggttatacctcaggttaaagagttgcatatcgggatcgtagaaaaataccaacaggatggccaatcgctaggccgtattccggtcaacataccggccttaaacttaaccaacggcaccctttttgcccgtttaggcaaaccttatgctagtcatgagagtggattctgcttctatccagagccgggggatgaagtaataatcggtttctttgaatgtgatcctcgttttccggtgatattaggtgccatgcataatcctaaaaatagatcaccgttagaacccagtgaaaagaatcaaatgaaaacgttagtgattaaacagggagagaatcagcaggcattaatcttcgataataaagacaatacgctcgcatttaatagtggaaaaaataccttatctttgcaacaggataaagatatcactattaattccgctaaaaatctcatcactcaggcgcaggaaattaatattcaagccgaaaaatccctatcagccgctggaaaatctggggttgatattaaaggggcgaaaattaatttaacacaataataggttaaataagatggcagacaaaatattagccgatatttatggtcggggctgggcatttccgccacaattttcttctcagacgggagtcatcatggcagaaggggcagaacatgtccgccagagtatgaaagtactttttctcaccgaacccggtgagcggattatgcgtgaagattatggctgtggtttgcatgattatctgtttgaaaatatcactgatgaattaatggcgcgtattcaaacgcgtattgaagagcgaatattacgttatgaaccccgagtggaaatgactgaaattcaggtgaatcaaaaaataaatttgcctaatagcctgcatattcaggtgagctatgccctgagaggtagcgaaattagccagcaagttgaaggtattattaagcttggtgaaggagaagtgatcttatgagtaaacaactggtggttgatggcgacactttgctattcgaacccttgttcggtaaccggcaggtcactattctggggccggcaatcgtccggggcagtggtcacgttaagatccaaggcaaaaaaatcgtaatggtgggggatgaaaaaaagatacagcttcaagcacaatatattactcctagccatccaatacccggcatgggtatggtcaccattgctcaattggatgtcggtcagcaggtaaatttttgtcgtagccctgccacggtgattgtggttggacagcaattcattgcccgttttaccccatcacagccggcaaataatccatcgagtggccccgatataaccgcacccagtatgggaaaaggccgatttattgccagtcaatatgctgtcagtgctggataaataatgttttaatttatttttaaatagtaatgatctcctgaaaaaatattaaagttatattcaaataacaggtggtataaatatggaacagaccgaattagaaaataaacttaccgctatggtatcggatacgacttttaaacttgatgaaagaagtacgcgggatatattaaactggattcaggaatatacggaaaaaatcccttttgaacaggggaaagaaaaattctggcatagcttctactttattcaggaaaatcatcctcagcaattagcggatatttaccaaaatgtgaataaagccaatggtcttttacccgctcatcaagcttttttattggcttttttaaaacttttagaaacgacaaaaatattattcaatacctttccggcgcgtcatcgcgatctttattatcgggaattattgggtttaacgccgagaagtgcccgagcggatcgggtggcgataggtattaccttgaatggaggtaacgcagaatatcttgtccctcaaggaacttactttgatgccggacatgatagcgctggcaatccattacagtatgtgtccgagtcgaatgtattggtgaatcaaggagaattgactgacctatattggtatcgaaaagagggcgatggttggaaatcggcaatgtcactgaatcttgcagatagcattaaattacctgagaacggtattcggctttttagcccaacacctaatgatgtttcagttctgtccggttacttaattacttcgcctttatttgcgatgttagcaggagagcgcacgattaaagtcacattagccagcaagtgggatggtgaatctgagcatatcacggctaatatcagcacagaaaatcgctggctttccttggcggtaaaacttgtcaacaaaacaacgcttgaacttggattgtctgccagtgatgcgtcgataactcctcctgatgccttggataatatgacgtttgatgtaccggtattaaaactgggtaccaaacagggaccgattttgcccaaaattatagacatagaagtcagcattaatggtaaccaaagtgtgtactatgcctctgatagtggtattgaacgaacggatgcatccagttttccctttggtcaatcaccgttgctaggctccggttttaatctgattgcccctgaatggtatggcactgaaaacgcaacgctcacgattactccccaatgggttggcttgcccaaagaaggttttaaagagtggtataaggaggttaagaagggtaaagaacttaaccctgtttataggattactgcaaatgacgcattcaaagtacagggctatttaatcactcctcaagaaagaaagacactcagtgctacccaatcgttatttggtggagataaggaaccacaggtccaaagcttaaaattcaccttaccggcaatgaatcaccttgttgcagatagctcatcgcccaatgaatggcctgcgtctgtgcgtatagaactggccggacaggattttatgcatacccaatattggcaagatcctaccggtaagaatttaccttataccccacaaatcagtgcattgcagattcaattcagcgctaaagctaaacctgagcaatttgctgtttaccctctgacgccttttggctggggcgaggcaacagcagaaatgcctgcattaactcatgaagcattctatttaggcttcacgggtgtacagccggggcaaactttatctctttattggcaattagaaggtattaagaagctcactttatcttggttttatctcaacaagcacaatacctggcgtaaattggataaattagttgatgatcaaaccggtaacctgtttgagcgaggtatctggcgcaccttattgccaaaggaggcttcaaataaagccgctttgatgccgacggggcggtactggttgaaagctgagatagttggaaaaacagatccccaagattacccacttgttaaaggtctgctatataacgccaccaccgccaccttagctaacgcagaaactgttgagcaagagcattttattaatggattgaccgccgacagcataaaacagccggtaaccactattccggcaatcagcagtgttacgcaaccttgggcttcttggaatggtcgcccgcaagagagtgagcaagccttcttaacacgaatccctgtccggttgtcccatcgtaaccgagtgttgagttggggaaatatggtcaccttactaaaggatcattttgtcagcctacttgatgtcagacaccattcaggcagtaaattgactaccattccggcaccggaagagcaacaactgatagttatcccggacagccgttacaaggataatgatgatgcgttacgcccaaaattgaacccggcacgattggctgagatggtcgaatggttaagtcaattaagtagcccttgggcaaccattgaaatcaacaatcctacttatgttgatgttaatgtggactatcaagtgaccttcatctctggcgttaattctgactatggccaccatcagctacaacagcaattaaaccggatatatatgccgtgggcggagaatcctgctatcggcgtgacgaccggtaactgcattgactattaccagttattagccaccatccaacaatcccctctggtagaacgtgtcaccgatttaagcataaccatagctaaccgaactacgggtgacgtgggtgcaagtatcgaagccaacgatgacgaagtgttgattttagtttggacagataagcgttctttaaaccaaggagttaacaatgaataatcaggatgctctgtttcccatcgttaaagacgatattgcctttgataccttacttgctcaggctaaggctgtgattgagcaatattccggtcaatattggagtgatatgagtgaaaatgatcccggtatcactttattggaagcctgttgttatggggcgtctgatttagcttatcgtcattcgttgccacttttggatcttcttacgcccggaaaagaggaacaggcacccggtgatggtattttccctcaagagtttggtccgcagcagatgctgacctgtggtccaattacactagcggattatcgtcgggcgttgctggatttacacagtggcgatacggttgagggttactttttatttaatgatgtactactgatatgtgaacctgacgatcagcgctatacatactggtatagcaaaaagaaacgtgaatacagtttcatgcaactccctgattcagaaagtaaacaattaacattaagaggaaattattggctttatttgctgcctagccgggaaactcaggccgataataagctggctcaggagaaacttaacgctttcctgaaagataaccgtaatctgggggaatgggtgagtcgggttatctggttaaaacctgttgatttgccattgaagattgatattcagcttgataatgatgttaaagatatcgctgacgtatttgctcaaatttatatgacagcggaacaaacggtgcaggaaaagccgctacgttataccactcaagcaatgaaagagatgggttacagtaatgaagaaatttttgatgggccttatttgcatcacggttggatacctgaattaccgccgaccaaagattacaacggtgccatagtgttaagtttaagccatttggttaaccaattattggctatcaagggagttcaaggtattactcggctggaattagataaagataataaggaaattatttctctgctaccgcaagataattggtcttgggaaattgcaaaaggatattatcccagattatggggcagtgatcccttaaaattgattacctcaccaaacagtccattgaatattattgccaaaggtggcgtgaaagttacggtttctagcgaagaaatcaagaaaaagcttattacagaaccgttgattaatacacaaccggaattattgaactggggtaagcatcgtaaagtgcgggattattacccggtaagcaataaattacccgcttgctatggattgcagactaataaacatagcttacaacaactacagttacaccaatttatgttgccttttgaacaactgctagctaatggctgtgcagaacttgccttattgccaaaactattggcgtttacacaacggggaaatacggtatacggtgcacaatggccttttaaagttaattccgttagtcagaacgttcatcaggcgataatgcctgacttaattaagaaactgaatgatgatgggcaaattgagaacgatggtggcatccatgagcgaaactatgcaaaagagctagctatccttgaatatctgttaagttattttggtgctcatcgagcggccagaccacttattctcaatccacaggattttttatccactcagcgcggttatttggctcaacaaccagagctggcctatcatcgtaataatatttgtattgataaagtatcggcgttgcaaaaacgaattgccgcccggttaggcttgggaagaaaatgttttaatgaaccgcctgatttggctgatctgcctttctatttaattgagcatcgtcaattgttacccgtgaaacctgatccggtattcaatagtgaacaaacacctgataatctggaaattaaagatcatcctgattctaaaagccatcacttaattattactcagcaaagtacggcagggcagttattgcatggtcagataattgacttaattgttaaaggtgagggcggattcacattacggggccaagtgatcacggaaattacagaaaaatcattttatcttgatacccgtaacagtgttgctctggaatacaatttggacagagtacaacaagcgtttatcgataaaaaactatgctggcaaaatagcccggtgtggttggaagatatggattatcaattggtttatgccgatgagacagatcaaatcgatgtcaaagatgaatactggatcacttccagtccccaaagcccttttccagccatgattaaagaaggtgatgaaatcacgctaaaatataaaattaccccttatgaaccaaccaaaaaaatagtagctagcatgaattctccatctgactatatgcttaaagctgtggtaaagaaattcgatcgtattgagggtaaaatattaattaaacgagataaagacaatgaggctgcttttccacaaaaggaaaatgcatggcgttatcgctggtatttctctggtgcagaatacgcgcatactgatcgtttctcatttgtcgtcagcgtagtcattaatcgtcagttaattgaaaatagcaaagttgatcctcataaattggaatcatgggtaaaaactgagattttaactgaatttccggcacatgtttccatgattatccattggttacccttagagcatttcaggaattttgccagcacctataaacattggcaaaataacggttctgctttaggggatgaagcataccatattttggaaatgttaacgttaggtcgtataccttccccattaacgggaacagggaatatgagaattgctactgaagaacaaagaactgaggttattggtgaatctgaaacagaatggcattctggatttattgagagtaaccagttgctgtatataccgaaaattcaggaagatattaatcgtaataaaggggattaatattgtattgcaataggagatacttattgcactattaaattcattgtctttaatgattatgtcattatacagtcgtaattttaggatattagcaatagcatagactaatatatataaggtgataaaaatggaaaagaaaaataatctatctaattcagagattaatccagaaaataccaataataaaacagaatctccttcggcggatgatttaaaaaaacgctttaaagcaggtagtattccattgcaaactgattatgaacgcttgattaatatggctgatattggccgtaaagcagtagggaaagcaccgcaacaaaatggaccaggaataggattgaagttggatgataatggtacgcttaatttaaagataggtactatccccgatcttgccgataaaggcttttctccattaatgttaaaaaatgatattttatctgtagaccttggtagtggtttgattaataaagacaatggaatatctgttggtcaaggtaatggtattgttgtaaatacagataatatagctgtcaaggccgctaatggtattactgttgatggtagtggtgtttcaattaaagcgggtaatggtatttcggttagtggaaatggagtagaagttaaggccaagaataatggcagtatttctgtcgagccagatggtatagctgttaaatgttgggacgggggcggtattgtggtaactgataataccggtctttatttgaaattagagggaggaaatacaaacaatgcttggagtggtgtaagtggtttgagcctgagtaaaaatggtgtaaaagttaaagcgggtaatggtattaaggtcgatgataaaggtgtcagcattgatcctaacaaagtccttcctagaggaatgattgtgatgttttctggtagcagtgttcctgagggatgggcattgtgtgatggtaaagataataggcccaatcttattgatagatttatcatgggaggtacaacacagaatattggtggtaagtcttcagattcattttcgggcgctaaagacaataaaaaattcacgttcatatcagaaagccagaccgttcgtatatcaggaagtactgacggacatggattaactgctgatgaaaatggtcctcaccaacatgagcaaggtgaaactctaaacaggcaaggtaagtgccataatggctatacagaagataatactgatcgtgactgggttgacggtggtagacgaggtcctgagccacctaattatagggcatacacatttccaagcggtaagggaaatccacactctcaccctataaatctgaccagcggtgggcataatcatagcaataatgttactgtgccgtattatatattggctttcattattaaactttaatatctatgaagaaattgagagtttaaattatcaattaatctcaaagagagtactatttatgatttcggagaaaaatttgttaaatcgaattactattactattgaagctaataatcaacaaggagctaaaaaattattacatggttctctgctcaatcaaatcggtgtacgtaaattatttaatttatattttaataaacatgttgttagtcaggatatctatttggataaattaacgctgaatcttggtgaaattaactcacctgattttaattcattatttcctattcgtcttaattctgaattaaataaatcattagatcaatattgtaaaaataataaggaaaaaaccattacagaaaattcaataatatccaaaagtgccggtaagttctctttattacagagtgattatttatctaatatcgaggaatttatccagtatttatatcaaaaagatattaaattaaatcatgaaaaagcaatggagagtaataggaatattaatgttaatgctgagtctttaattaatcaattaatgagaatagagaaaaatttaacattattattagcaaaaagctgcttatctgagcacggtttacaacggcttttagctatcagccagccaactttattaagcgaaattaatcacaaattatcggagaatatagatagatctcagcatcaaggaaaggtagttacctcttggcaattggtcttgaatgcattgggatatatacagcggcataatatgcaggaaatacctaaaccagatataaaagtgatatcatatatcatggctgaatttgatagcagtatgcttgatattgtgcctattattaccttatttcgccaaaatataatcgctgaaagtaccttattaaatgaatggttgaagccaatttggcaaatagaatggattccaaaactgtgtaaaaaacacctctctgttcaggaatataaaagtttagccaatcgttttggctgtgaaactcagacttttagagaacaatctttacagcaaacagatccagttaattcaatgattactgagctattactgaaattatctacaaaacatcgggaaaatttaccaccattaagtcagcatcaactttcatcaataactctttcattgatcactacagcgattcaaaaaggagaaataaaagtaaaaaatatcatccagttattgcaacatccagcgttatataaccaaacagggacaacttggttatccccactatggcaattagactctgtttcacaactctgtaaaaaacatctctctgctgaagagtataacgaactgtcgcaacgttttatgtcaaataatgccaatcaagcattaatccctcaagatcagacaatattatcaatatcaaataattttcacgtcaaagacaataattgtaatcaatatcagataagtaatgctggaatattaattctatggccgatgttacccgctttatttaatcaactagatctacttgaggagaagaagtttattcatcagcaagctcaatttagggcggttgatttccttgattatcttatttggggagatgaagagggtctggtagagagaaaaaccctaaataaagttttatgtgggctaatgattgatgaagagacgcaatcaattcttgttgaaccagaaaaacagttaataatagcacaatggttggatgtgattatcgctcaacttccgggctggaaaaaactgagccgtaatgatgttcgccaactgtttttacaacgaccgggtgaattactgatagataaacaggaaatcaaaattacgctacaacatcagccatttgatctgttattagctgactggccgtggccgttaaatatcgtcaaactcccttggttaaatcgtcctttacaggttgactggcaaaatatttaaaaggtctatatgaactctttacttaaaaatagtcactacgtggtgacggaattacattggatttatccccatctggagcgtatcgatctgctattacagcgctattattatcaaaagagggaaaggtacgattcattaccggagagttttttacttactgagaataaggtagaggaatatttgatacaaccgcaaggctttcctcattggctatttgaggagggtaatattgttgatcatccgaaaaccgaagaacattttgcttctgatgcgctgtctttattggttgaacgttttgaactcacggaatttgagcgtgatgtcttattactcggtttattgccacattttgacagccgttatcatgcattatttgctgctctgcacggtaatagtaaaaaacagtggcctggctttgctttagcaattgaattatttagtcaacgccacagtgattggcaattattgcaaaactgctttttaccatcctcaccattaataaggaaccaactattacggctcaataaccacgaagaagctatctggttacaaacgcaatttttaacccacagcgccgtctggcattttttatcaggacaacaggtaatttttccgcccctaataaattgtgcttattggcattctcctacttcgaacgtttggtatccatcaactctttatcattcatttgaaaagatattattgaatgaaactgatgaaattcgcccgttggtgatactgagaggaaaacagggcagtgccagagagttagcggttagcaatattatggcgtttcatagcatcagtactctaattttggatttagctcgattgccagaggaagagaatttaactgtaatagctagtttgctggcagatgcagtgagagaagcacggttacataatgcttgtttattaattcgtcatttttctttacttgcagatgaaaagaaaacattgaataacctattatccattttgctgcatcaacccaaattaccggtggtttgtttagtagagccgggagacgcattagtctggattaaacatttatcaatggtgcaaattgagatgccggtagctacacgggtggataaagaatctatgttgaaagaatgtttaccggataatgccgctcagaaagttaatcttgcacaattgtgtcagcgtttctcatttaccgcggaaactttaccgttaattcttaaagaagcttatcaatatcaaatattacgacaaccagatgatcaattagaagagatagatttacgtaaagcattaagtttccgcgctcaacagaatttaggtaaactggctcgacgaataacgccaaaacgtaattttaatgatttagtggtttctgatgaattagctcaacaattgaaagagattattgcaacgattaattaccgtgaccagattttgggtgctggctttcaggaaaaagtaggttatggcacgggtattagtgcactgtttcacggtgaatcgggaacgggtaaaacgatggccgcagaagtgattgccgggcatcttggtgttgatttgattaaagttgatctttctaccgtggtgaataaatatattggtgaaacggaaaaaaatatcgcccgtattttcgatttagctgaatcggattccggggtactgttttttgatgaagccgatgcactgtttggtaagcgcagtgaaaccaaagatgctcaagatagacatgccaatattgaagtttcttatctgttacaacggctggaggattatccgggattggtgattttagcgactaataaccgtagccatttggatagcgcttttaatcgtcgttttacttttattacccattttacttatcctgacgaagtattacgtaaaaaaatgtggcaaactatttggcctgaacaactgaaattatccggtgaaattgattttgcacatttggctaaacgagctgatttgactggggctaatatcagaaatattgccttattggcatcaatattagccacagacaataatagtgaaaaaattgagcatcaacatatagagcgggcagttattctcgaattaaataagagtggcagactgattttttaaatatttattaaatttggagtcgatatgaaagataccattgaacctaacaatgctattgtcgaagttaataatgcattaaaagatattctatctcgatatttaaataatattgatattcgttttgatttgccagatatagattcaattccatctaaaccgacaataagtgtatttctttatgatgtacatgaagatttgcaattacgctctgctgaaccgaagcgttataatcctgtgactaatttattgttaccgggatgggtcaatattaattataattatttaattacttactggcattcgaataaaccctcagttgatggtagtagcccggatagtcagcctgataatcaggcggcaaaaataatgacctctattttgaacgcgttgattaatcatcgtcaattacccaaaattcctggtgcctacaccaaagttattccaccacaggaaaatttaaatagtttaggtaatttttggcaggctcttggcaatcgacctcgactttctttattatattccattaccgcaccggtgaaacttcaagatattacaaatatagtagagccagttatggatatttcccattctgtggatcaaaaactgtatctgactagctcacaaatatgtcaggaattattagaaaaattatgtgttgatttaggtggtacggaagatatacgtttggcactgactaaagtgaatctaacaattgaaccgcttgtaccagccacaggcaataatgaaaatgaaaaaattattcttgaggcttcaggtattactttttcaacctattactctaaaataaaagagattctttcaacatgggtaaacagtcgtaaagcagttgttaagataaatggcataggtattattgttgataaagtagattttaataaattaattagcattgaaaagtaattacttaattaattacccataataagatggcaagtaatagaagataacaatatttttattgattgctttatataaaaacatcttgttattagtagtgttttaatctatatattacttacttataactcttgggtgatgatattatgccaatcagcaatcttgcaaaagaatctgaagttcgtgccgtaaaagatataccctgtaaaaatatagaaaccgataatcatctggaaataggtctttcttctggcttatcgagatcaaaggatacctcaaaatttaaaaaaaatagtataaataccataaaattgatagatgatattatcgcactacataatgatccgaaagggaataaattactgtggaatgataattggcaggataaaatcattaatcgggatttggcgaatatatttgaaaagattgatgaaagtgtttctgaattaggtggtcttgaaatgtaccaagaaatggttggggtaaatccttatgatcctactgagccagtttgcggtttatctgcccaaaatatatttaaattaatgactgagggagaacatgcagttgatccagtagaaatggcccagacagggaaaatagatggtaatgaatttgctgaaagtgttgatcagcttagtagtgcaaaaaattatgttgcattggttaatgatcgtcgacttgggcatatgtttttaattgatatcccatccaatgatcaggaaacagtgggatatatctatcaatcagatttaggacaaggggcattacctccgctgaaaatagcagattggttaaattccagaggaaaagatgccgttagtcttaataaattaaaaaagttgttaagccgtgagtttaatctattatctgatgatgaaaagagagcgttgatttcagagacgcttgatatacataaagatgtatctaatgttgagttggatagaataaagagagatagaggggtggatatttatttaaccgaatacgatgttaataacttttatgaaaatattgaaacattaaaatctaaactttctaattatgataaaaaattgagtaaaccaaaatgaattgtgttatctaaatattatattaggattgtcagaataatattaggtaaatcaaagtcttggatatacccaatggatttcaagatagatcgtgacggcaatggaacgaatccccgggagcatagataacgatgtgagcggggtgagtgcagccaacaaagaggcaacttgaaagatgacgggtatatttatgcctaaggattctgtgagtcactttatcgtagaagatttaatactccttaggcaaggagtgtctttgtgtcatgagactatttatagatagatttgtaaagataaaataaaatgaggtgatttatggaagcatctgaggattgccagtaaatattattgtaaacgatatggttgctatgagttcatttattagttgaatcctcgtggttataagaattttatctttgaaaaggtagaggtgattatatgtatgactcgaaaaaaaagaatagtgaaccaacaacaaagaagaaatttgaaagaagtaattatagtcaatgggatgacagcattaaccactatgaagacatgaatcgtgccagaataaaaaacagaaatgatatattgaccactgttgattattttggtgaaaaaaagaagacaatgcatacatttgaataccagtcggatattaaacatgatactaattttaataataaaaataagtcattgtttgagtctttcgctgcatcatttgttttacaaaatccatcttttttttcaggtgtaatagataaattatcaaaaaaattattcaatataatatctaagatcgatgaaagaaataatttccaaaaaaaactgtacgattttattgaaaaagatacgagtccagagggccaatttggccgatttactctaggtaaaaatgaaatcttaaatgtattgcaagtaaaatcggatactcctcaattatttgttaaaaaaatgctattaataaagtctttgggagcttttattattgatttttcctcaaaagatattggaaattatgattttatctttgatggaaaagggagagaagtaaatgatataatagaaaaaaacagaccaactaatctttttaaagttagaggaaggaccaatattaagagcagccaacatcgttcagatataggtattttagatactccaacctttgatagtcttacggaagagcaaaaatcatttttaaccattccagaacttacaaaacgtagaccactatttagaacatttacacatgaattggatgctgaggataaaagggtcgtagagtcagtgtttgttaacagaacctttgattgtgattctccattaataggatccgtatctggtagtacatcttgtgttttagttgctgctgatattttattccctgatatgactatggtggaaaggaagaaattagcaatagcaacctttgcatttttagttggtggaggataccattcagcaactgaggtgtttgatgttgcctatcctggattagatttgaataaagaaatagaagagttgattgagaataacccgatccaagaaaatgctggtgtggctaccttacggcagcttatcggaaacagtggtttttaaggacaatgatagtgttgcgtgccctatattgcagttgtggctttctaagattaagaaataaaactctgtaagcgtcgtaggattatcaataatctgattcagcctcccatacaagagaggccgaattaatatcgctttattggtgagtaggcgtctataacaccagatccaagatgatgacaccacacaagccaatcgcccatgcaatagtggtgggtattgaccaaacgaacatctgttgtttggcatctttgattcccatcatgcggttaacgacccagaataggctgtcattaaaataaccaaagaataatgagcccatcgttgctgcttgtgcggcaaccagcatgttgatccccggaatttgactaataattggcgcagaaatagaagcagcagtaatcattgccaccgtgccggaaccttgaattaagcgaaccagtgttgcgatgataaatggaatcagcaccggtgttagtgggagagtggctatatattgcgccagaatggtgccggtaccactttcgcgcaataccgctcctaacgcaccgcctgcgcctgtcaccaataaaataataccggcagcctgtaaaccttcttccagacggtcaatgacttcatgtttattggcttttggcatcaaggtataaaccgccaataatacgctgatggctaaagcaataacgggtgcaccaaggaaatcaaatgtctgaaaatagaagttgttttcttgtccagtcaaagttttagtgtttaataataggctattaatggctttaatgaagatcaaaacgatagggacaataatcggcagcagggaaagaaataggctcggtagcggtttgttcgctttctcttccatgtagcgttggtggattgtttgtagatcttgcgcttcttctgcttcatcaatgggttgaaattcaggatattttactgctaaccatttggcataaaatacaatgccaataacgcaaggcaccgccagaaccataccggttaacatcatggcaccaatgtcgacaccgaaaataccagcaacccccagtggccccggtgttggcggaacagtgtggtgggtaacaaccaatccgccagccagtgccacgccaagcgttagaagatgacgttttcccttttttgcgagtgcttttgccagtgggtagaggataacaaaggcagagtcgacgaaaattgggatactgacgatataaccggtgatcgctaatgcccactcttcgcgttttttacctaaccatttgataaagctgtaggctatctgttccgcggcgccggaaacttccagcacccgtcccatcatgacccccagaccgataacaattccgatactgcccagtgtggagccaaaacctttagtcataacatcaatggtatttgctgcggttaagccaccagagagcccagcgatcgctgctgcgatgagcatggctaataaagcatgaacacgggtacgtagcaccagaaagatcaacgtaaatacggctacacccagaccaacgaccggaatgtagtgttccataattagcctccagtttgggacaggttattggtaataaaggcacggattgtatcactgaaagtattatcagcatgaaaacccagtgataagccacggctgatatcgaaatgacccggccaactggcaacaatacggttaatgttttcgtctggttcgaagcggatgagttccaccgctttctgcccggcaacctctgccagtgcatcaatcatctcctgaaccgtgacactaatacccggtaaattgactgtgcgggaaagaccaaatttttccgccggaatttgaaccgcatgtataaagttgtggatcacggtttcagggctggagagccataaagtcagatcgcgagaaactgggcagatgctgctttctccgtgtagaggttcacggatgatagcactggcaaaagaggatgctgctttgtttggcttcccagggcggatactgattgtcggtagacgaagaactcggccatcgacgtatcctttgcgggagtaatcgttaatcatcaattcacacatggctttctgtgcaccataggatgattgaggattaaccgcacattgatctgtaatggttgcgggtaattctccaccaaatacggccaaggagctggtgaaaataaatttcaattttggatttttagcccgggcaacgtttaataagttgcgagtaacatcaaagttaacttgcaagccaagatcaaaatcgctttcagcgtgactactgacaatggcggcgagatggaataataccgtgctgttttcatcgatcagcttttccgcagcccttgattgagttaaatccaatgccagacactggacgcggggatcattaaccggtgagacagggcattgaatatcggtcaatataagttgatcgaaatttaatgtttgatggttgtttagcaaagtgctggcgagttgctggcctagaaaacctgctccaccagtgattatgactttcattgcgactctccttgtttaatagctttggttatatatacccgtcatctttcaagttgcctctttgttggctgcactcgctcaccccggtcacatcgtttgctatgctcccggggattcactcccttgccgtcgcggtgcatcttgaaatccatagggtatagggtttttatccttatacgctgacagtatgtaataccaggttgtgttctcgtaattgttgctgcactttcggcggaagctggctgtcacagacaatatcatccaaacttgcaagcgggcagacccgaaacatgccgtatttgccatatttactgctatcagataccaaaacacgacggcgggcgatttccaatactgcctgtttgactaatactttttcttcatgtggcgtggagacaccatgctctagatcccatgaactggtgctaataaaggcaatatccacatttagattgcgaagcagcatggcggcgatagggccaacacaggaatgatttctcttatctacctgccccccggtatggaacagatttaattggggtttgttcatcagatattgggtaatggaaaaatcgttcgtgatgatagtgaggttaaaacgctcagccaagactctggcaatttcaaacgtggtggtgccagcatcaagatagaccacttgtccatcttcaaccatagagactgcatattgaccaatttcccgcttatggcgatgattaagctgggctttttcattccaaggcaattcctgacgtaaaacatcactaagttgcacaccgccactgacactaacgacttttccttcttcctccagagtgtggatatcccgccgtactgtcatatgtgagacattcatcagtttaaccagtgtactgatagaaattgtccgatattcgtgtacatagcgataaataaagtccctacgctctgatggaagcatatcttctcctgattatttctgtgctttggtcaaccaatccagaccctcttcggtgtaacccgcagggtgatattcacagcccaaccacccttgatagcccatttcatccagtttgttaaatagccacggatagttcacttcgccgctatcgggttcgtggcgttcgggcaccgaggcaatctggatgtgactgaatttgtcccatagacgttcaatggtgcgtagcaaatccccttccataatctggcaatgataaagatctagctggataaaaacattttgacggtcaatttctttgagtaatgtttcagcttgatgctgagttgtcagaaagtaacccggcatatcacgcgtattaattggttcaattaatacgttgatgttatgttctgccatcacatcagcggcatatcgaatgtttctgatataacactcacgttgttgttctggtgtgaagtgttcatgcagctttcctgccatcgcatgaacttgcttgcagttcagcgccagtgcatatttcagcgcggtttgcacaccggcggcaaattctttttcacggccaggcatagaggctattcctctttctcccgccgcccagtctccggcgggcatgttgaatagagcttgggttaattgatgctgttttaatagggcagcaagctcttccgctgcgacttcataaggaaacagatattcaacgcctttaaatccagctttggctgcacgggcaaaacgttctgtgaaaggtacatcattgaacatcatgctcaagtttgccgcgaatttagccatgacgaattccttgtttgttcactcagtttttgggtaacgagtttcaagttcttggacttgctcttcatttaatgtcgtgaagccgtgtggcaataaggttaaatagagccgtgcggtatcttccaattcttctgcgttgaaaaaagcttgccgtaaagttttgccgccgacaacaggtccgtggttcgagaggaggattgcgttgtgttttgcggccagcttcgcaatttcttcaccgattctttcatctcctggtggcagatatttgaccagaggcagttttccgacccgcatgacatagtagggcgtaatcggaggtagacagttacttctatccagattggataggcaggaaagggcagttaaccaaggggaatgtagatggaccaccgcatggcattcgggacggttgcggtacatggccaaatgcatggaaacttcttttgtgggtttgtcaccggatagccaattaccctctgcatctagcttactcaggcgattcgcttgcaagtcaccaaaactggagttggtcggcgtgatgataatcgtgccatcttccagtttggcgctgatgttacctgcaccgccactgctataaccccggtagaacattgaacgagcccattcgactaactctgaccttagtgcttgttcactcatgaaacatctcctgtacatgcaggaagaaatcgatattgccgaagttacctgatttcaatgccagccaataattgtgttgtcgatcgtgtacccaaggtactccgggagcaatgggtgcaccgatactgaattgttggatgtccaagctttgtactatcttaccggcagtctcgccgcctgcgacaataaaggtattgaatcctagctggctcagaccttttacaacgctggcgaaggtgttttctattgcttcactggcagtagttgcaccatattgttgctggattttctgtaatgtttctgggaggtgagtggtgtatagcatcggtgccagatagttttcggattgctgaataacccacgcaaccagcttttcggcatattgtggatcattgatgcatgaatcaatattcagggctttagttggagcgaatttctggtatagagcaacttgtttgttggtcatgacggaacaactgccagaaaggatcacggtgcgtctattctcggcgggtggggttgctccttccggttggtatggcatcaatggcttaccggtgtctgtgctggcaagggcagcaccaagaccagagccaccagtgattaatttcagcgctgatgccgctctggcaataggcagtaggtcattcatggagagggtatctgttattgcgtagcgtatgttttgttgttgtaaatgatttagccttacgcggattgcctgctcgccttggtgtacacatgccagatccaccagatctgctttcccttgagcttgttgttctattaggcgcagtagattggcatctgtcattggtgtcaccggatggtgctgcataccactttcattaagtagttgaccgttgacaaatagatgcccatgtataacggttcgcccgttaacgggaagggcaggggagatcagcgtgatgtctgtttgtagttcatccatcagggcatccgtgaccggcccaatattgcctttgctggtagagtcaaaagttgagcagtatttgaagaatatttgttgacaacctgttttctgacgtaaccagcggcaggatttcactgcgttattcacggcttcgtctatcgggcaggaacggcttttcaggctgataacgatagcatcaatatcctgtggaatggcgatattttcatcaggtgtatccagtaactggacaactcgccaaccgctttgtgccataaaaccggcgatatcggttgcgccggtaaagtcatcagcgataacgcccaatttaatggtcattattttttctccggcaaagtgatacctttaaatgttttgataaccgcgctgtcatcccattggccgaaaccttcattactggcagtaaggaacatttgatgtgcagtggctgataatggtaatgggagtttcagatctctacctgtttctaagactaatctcagatctttgacaaaaatgtctacggaggatttagcagtgtaatcccctgccagaatatgggggacgcggttttcaaacatccaagagttacccgccgcgtgggtgacaatgtcgtacatcagctccagagaaatgccggctttggccgccaatgccatactttccgctgcggcagcaatatgtataccggcaagtaattgatggattgttttgacggtagagccttgaccaatttcatttccaacatggtagagacgttcggtggtggcatcaaatacgggttttagttgttcaaataatgcgggttcaccggaagccataacggtgagctggccttgttcagcttttagtgcgccccctgaaataggcgcgtccagcatgtttagattgtgttggctaagacgatgggcaaaatctttagcctgttctgcggcaacggtactgtgaagcacaatgatcgtaccggcttttaactggttgactaacggtgtttcgccctcaaacaggatgctttctatttgagcaccattgacaacaacaagtaagatagcatccagctctgatgcccaatttgctgcgttgtttgtcgccgctttagcgcctgcttgtagtagttggtcacaggctttttggtttaaatcaaatccatacgtgggaatgcccgcgcgtattaacgcgcgggcaattcccatgcccatagcccccaatcctataattcctattttttgtattgattggctcatggtggttccctggtgttgttgttataatttgttattcttttatcattatttcacacgtcatttcacaaatacacgatggttatcacattctaatgcccgctgtttgaaggtggttatttttgtaattatttgatttatattatttattgttgatttttgcgaaatgttaaatttcacataaaggtgtgataagaaatatcattgtgggtacattaaggttgggtaagcgcttttcactgaattcttttaaagatgttagttagtctctggaactgttaagggtaggtaatttaggagcgttgctgtaggttgtctgtttttggaggaatcaaggggtataaacgagaagtatgtttttattgggtttgtttgtaaggcttgaaggatatttatggtggtgggggaaggattcgaaccttcgaagtctgtgacggcagatttacagtctgctccctttggccgctcgggaaccccaccagattttgaaatatatcactgttgctaacagtggccggaatcataccaaatgagccgccgctgtaaagtagatatttaaaaataagtgacgatatgctgattttccatccttattgatcttgttgtgagcaaagaagtggtctgtttgctggtggcgggggaaggatgactcgtcactgcgttcctcgccctgcgggccaacgcgtcgcaagcgccgcattgttgtttcgctgcgctcaactcgaaccttcgaagtctgtgacggcagatttaccgtctgctccctttggccgctcgggaacttcacccgattttgaaatgtatcattgttgctaacagtggccggagtcacatcaaatgagccgccgctgtaaagtagatatttaaaaataagtgacgatatgctgattttccatccttattgatcttgttgtgagcaaagaagtggtctgtttgctggtgacgggggaaggatgactcgtcactgcgctcctcgcccttaaataaggttatcgaggttattttttattgatatttggagttattggggttatgatttttaccaagttaaacagataggagttcttaaaattattggaggagtataacgtgttatatcctattgcgattgaaattggtgatgagaaccacgcttacggcgtggttgtgcccgatatatcaggttgtttctcggcgggtgattcaatggaggatgcaataaaaaactccaaggaagcgattactgggcatttagagttattggccgaaatgaaccaattaccccctgaagcaaagtcattggattactggatcaaagatgaagaatacgcagggtgggcatgggccgtaattgacattgatgttgaaccatatttaggtaaatcgacaaaattcaacgtcactctgcctgatttgttatcaaagaaaatcgatgatcaagttaaagcaagcccaaacttgtacaagaatcgtagccactttttgcaagtggctgctttgcatgaattgcaaaacagtatttagcaataatgatgatcaatcagcctcatattttttatgaggcttaatttaatgagggcgtttaaatctgtacttgtatatgtacatgctacacgtaaggattacatttcaaattcaactggataatccggctctccttcaaaaccacgtcctttgtaatacagaagctctcggttttctttactaagaggaaacggccggaccgaccagacggtttagatgagccgcttacgattttccatccttattgatctggttgtgagcaaataagtggtctgtttgctggtggcgggggaaggatgattcatcatttttgaaaagtcaccactactgcttacagcggccagaatcacatcaaatgaactgccgctgtaaagcatatgcttgaaaataagttaccgtgtcctgtttttgggcctcaattaattcagctttaaagaattacagtacggttgccgtaaacaaaaacccgctgagcaagaacccaaaataaagcatggctcagaacatttttttcaacatcccggcccgctctcatcatatcttcagccgtgtatgtgtggtctatgttaatgaccttctgagtaataattggaccttcatccagattatcattcacataatgtgctgttgcgccgatgatttttacccctctctcataagcctgatgataaggacgcgccccgataaatgcaggtaaaaaggagtggtgaatgttaataatctgatttggataatgttggacaaattctggtgtcagtactcgcatgtatttagctaataccacgtagtcaggtttgtattggtcaatctgggcaatcagtttttcatcatgttgttcacgggttaaaccctcgtgactgattaaatggaaaggaatgccaaattgttcaaccaatgattgtaatgttgcgtgattgccgataaccgccgcaatttcaacatcaagcccgtcataagcgcttttcatgagcaaatccccaagacaatgcgcttcttttgtcaccataatgacaatacgccgacgccccgcactatttaattcccgttgagaacccaccggtagtgcatcatctaaatcagcaagcaatgtctcatcattgaagattccttcaagctcagtacgcataaaaaagcggccagtacgatgatcgacgaattcattattctgaactatattcagttggtgtttgtagcaaatattagtaattttggcgatcagtcctttagcatcagggcaaatagtgcgtaaaattttcttttgtatatgttggtgttgcatggatgggattatccttaaatattttgtgtttgctgtttatgggccttaaccacaacattttttgtattttttacccgaaccacatgggcaggggctattacggccaatttgaggttttatgccatcaataggttttacgccatcaatatagtaccaatgctggtctatacgaagaaaacgtgaacgctcatgaataagttgcttatcttgggatttctgatcaagaaagcaagctgaaaattcaacataggcttcgttatcattttcgcctttttcagttgtaatgacattgagtccgagccactgggtaacaataaaactctgttctatatctaaacgccacttttcagcctggcagtcaggatgccaactggtaattagataatcggcgttgtgctttacataggcactgtatcgggaacgcatcagtgattcggcagtttgggcaaattttatgttttggagataaggggaacagcaatccgcaaaatctattccactaccacaaggacatagctctgtcaaaattaactccaattgtaaagggtgaaataccatttttatgggttttctattgcaaagaaacgtaagagaacaaatgatagtcacttaattgaactaatatgagtgatagtacctaagaaaaggtgaaggtcgcaatattaaggtaagggagcgtatttatggaaaaggcattggcaggcaaaaaaattctgattgtggaggatgaacctgttttttgttctttgctggcagggtatttgcgaacgttgggcgctaaggtattagtcgcatctaatggcgctgttgcactacaggtgctaggacgcgaagctcatgttgaacttattttatgtgatttagatatgccggttatgaatggcattgaatttattgcgaaattgacgaatgagggtattagcattccagttattattatttcagcgactaacaagatggccgaaattgatgaagtgcttcgtttgggagcaaaagatgttttattaaaaccggtttcagatcttaatgagataaaaaaatcggtgttggcctatttacatcctacggtctttatgtctggtgcgattgaacagaataacttgaataaagattggttaaccctaaagcataattcggatgaagcattaaatatgcttaagcagttacaacccccagtttctcaagtgattgcccattgtaaagtcaattaccgaaaattaaatatgattgataatccagggttaattctcgatatggcggcgttatctgacaatgaattagctttttattgtctagatattagccgttcaaaagagtatggtgtgatttcagcattattacttagagtcatatttaacagtttgttacaagagcatatcatccaccattcccggcgtttacccaatatggcagctattctaaatagaattaataacttactggaaggtgcagggttacaagggcaatttccattgctgcttgggtattatcatacgatcaataaaacggttctgctcacttccgcggggttacatgccagtattaagtcgggtaatcgccaaatccaattagacagtggtgttcctcttgggacattgagaacgatttgttcgaaccaagtttgttctcatagtgctgaatggcaatgtcggatttggaatacaaatagtcaaataaatctgatgctttcttcaatgtattctgggtgaatattcccaaggtggaattttgtttaaaatggattttaaacatcaagtcacggtaatgtaattatacagaatggtgatgtttatcgaagagaattagctggtatactccgcctattatgcttggaaatctatctaatcaggctattttatttgccgctctttagtacaaagaacggatttagcactgctcagatgaaagtgataactttttgagtggtcagaagggtgaacgaagccgtgaacttttgtatgcattggttcctgcgtgctgttcgtgtgcgcggtttattgacacaaaataatcagtaatagtgatgccttattaaagaattggcactgattttgagttgaagacagatttgtttcagccaaaaaacatcgggagaaaggtaatgccattagtaaacgaaccattagtagaaaaatcattagtagaaaaagtatcagtagaaaaaacatcagtagaaaaaacatcagtagaaaaaatagtaaaaaaagccgttattcccgttgcgggcttgggaacgaggatgttgcctgctacgaaagcaattcctaaagagatgttgcctttagtagataaacctcttattcagtatgttgttaatgaatgtattgccgctgggattaatgaaattatcttggtgactcattcatcaaaaaattcaattgaaaaccattttgataccagttttgagttagaagctatccttgagaaaagggtgaagcgtcaattattggacgaagttcaatctatttgtccaagtcatgtcaccatcatgcaaactcgtcagggaattgctaaaggattagggcatgcggtgttatgtgccaagcctttaatcggtgatgaaccttttgctgtgatactgcctgatgttattcttgatgaatacagtacagatctgaccagatataatctaagcgaaatgttggttcggtataatgaaacgggcgcgagtcaaatattagtagaacctgtacctcatgaagaagtttctagttatggtattgtcgattgtcagggggaaaatcttcaacccggtgacagcaaactcattaagcgcgtggttgaaaaacctaaaccgaaagaagcaccatcaaatctttctattgttggccgttacgtattgtccgagaaaatttggccgttattagcaaaaacagcgcccggtgccggtgatgaaattcaacttactgatgcaatcgctatgttaatagaaagggaacctgtggaagcctatcatttgcagggtgtaagccatgattgcggtaataagcttggttatatgcaggcatttgtccggtatggtatgaaacatcatgctttgggcaaagaatttacggattggttagtggcgttgcaggatcaggttaaagaataattttacggaaatttagggattatatgaaagttacggtgtttggtattggctatgttggcttggttcaggcggcggttttagctgaagtcggtcataatgttctttgtattgatatagatgcaaataaagttgaaaatttgaaaaatggccaaattcccatttttgaacctggattagctccactggtgaaaaaaaattatgaagaaggccgtctgaattttagtacggatgcaaaggccggtgtggcacacggtaaattgcaatttattgctgttggtactcctcctgatgaagatggttcagcagatttgaagtatgtgacagcggttgctcgtactattgcggaatatatggatagctataaggtgattatcgataaatctacggttcctgttggtaccgcagataaagttaatgccgttgttaatgagactctgcgtcaacgtaatattgatattccatttgatgtggtttctaaccctgagttccttaaagaaggcgcggctgttgcagattgtatgcgccctgaacggattattattgggtgtgacaatgaaagagtcgttgacctaatgtatgaattgtatgaaccatttaatcgtaatcatgatcgtatgattgtgatggatatccgtagcgcagaactgacaaagtatgctgctaactgtatgttggcaacgaaaatcagttttatgaatgagatatctaatttagctgaaatgcttggcgctgatattgaacatgttcgtcaaggaattggttctgattcccgtattggctatcattttatctatccgggctgtggttatggtggctcatgcttcccgaaagatgtgcaggcgttaattcgtaccgcagagcaaattggttatcagcctaaaattcttcgtgctgtggagcaagtgaatgaactgcaaaagcataaattgccttcttttgtaacgcgccatttcggtgaagatttatccggtaagacattttctgtctggggattatcgttcaaaccgaataccgatgatatgcgtgaagcatcaagccgtgttttgatggaagcattatggcaggccggagccaaaatacaggcttacgatcctgaggcgatgcaggaagctcagcgtatttatggtcagcgtgatgatttattattgatgggaactaaagaagcagcgcttaagggagccgatgccttgatcatttgtactgaatggcaaagttttcgtgcgccagattttgatgtcatcaaagagtctctcaaaacgccggttatctttgatggccggaatctctatgatcctgaacgcctgcaatcccgaggttttacttattatgggattggtcgtggtgcttccattaatccggttatctgagtaatacaatgaaattcttagtcacaggtgctgctggttttattggctttcatgtgagccagagattattgcaaatggggcatgaggttgtgggtatcgacaaccttaatgactattatgatgtgaatctcaaacaagcacggttagatctattatttgataggtcaggttttaaatttgaaaagctagatttagctgacagaatagccattcccgatcttttttcgcgacaccaatttcagcgggttatccatctgggagctcaggcgggtgttcgctattcgttgcaaaacccaatggcttacattgattcgaatataatagggcatatcaatattctggaaggttgccgtcacaataatgttgagcatttattatattcttcttctagttctgtttatggattaaatagaaagcaaccgttttctacaaacgattcggttgatcatcccgtttcactatatgcggcaacgaaaaaatcagatgaattaatgtctcacagttactctcatctttatcagttgccaacgacaggtttgcgcttctttacagtatatggtccgtggggacgtcctgatatggctttatttaagttcaccaaggccatgttatcagggcagcctattgatgtttataaccacggtaatatggttagagattttacgtatatagatgatatcgttgaatcaataatcagattgcaagagatcattcccacatcaaatgagggctggatggttgaagatgggcaaatatctgccagctctgccccttactgtatttataatattggtaatggtcaaccaactagactaggtgattttattgaagcaatagaagaatcattaggcattcaggctaagaaaaatttcatgcccatgcaagatggtgatgttctgtcgacctgtgctgattcaagtggcattgtccaaaaaatagggtttgccccaaatacatctgtgaagcagggtgtgaagcagtttgtagagtggtatttgagtttctatcatcagtctaaataagataaggagccgttggctccttatctattgaatcaacgaccgtgaccagagagaaggaaatagttgtgcctgtttgattattaatttatctaggcattggctaagtgagtaactagccttgctttgtcataaagaaaggatacaaaaaacgggcaactcgactaaattcttctcaaggatacttatctcgtttgtacgatagacgttaattcttttgtcagctaagttgttttacaataaaaacacccttctattttaaaagggtgtttttaattaaattaacttgaaaaacaatgaattagagtaagaaactttccagcgttcttccttcgtcttcaattgcttttttgataacagcaggtgtacgtccttggccagtccaagttttagtttcaccgtttgtatcaacatattggtatttagctggacgtgcaggacgttttgctttaccagcagatttgccggcgctcattgtctgaagcaattcgcttggatcaattccttggtcaagaatcattttacgaacttcttccaatttacgtgtacgttcctctaattcagcttgtacctgactttcttcttcacgacgttcttcaacaacgacggtcagtttctcaagtatttcatctaagaactcaagttggcattctcttgcttgggctcgtaaagtacggatgttatttagggtttttaaatcgctcattgtcctggtctcaaattattaatgatgatggcggatgtggatataataatagaatgctattttattttctgcaatagtcaatttctcatattccgataaaatagctctttttttttaaacgtaatttctttacaaaagttatatagcgctttttatacagctatttcgattgtcattccccaataacatgttcagggtacctttaacaaagaggcgacatgataatctctctaatttataaaccaggtatatactaaatcggtaagtaattttaactgtttcttatcatacccgctaaagcagaataatactaagttaaaaaaaacttatgactaatccatgagttatcgctgatttactgttaccggttcctggaagtaaatcacgcacattattaatttgcatacgatatgcaacaaatcagcctggctttcattttttaatttaagcatgaacatttgtcactcaaatgcgttttattactcggctggtgtgatggtggtcatgaatcattaagacatcactaagctaaatatttcggtatatcaacccgtgcagcttactaagatggataatcacgactcaagtttatggtaaactcatctgactatatggctttataaattttgttaaggggcagggttgatggctcaactttatttttattactccgcaatgaatgctggaaaatcgacatccttgttgcaatcctcttataactataatgaaagagggatgagaacgctggtgtttaccgcagaaattgacacccggtttgaaaatggaaaagtcaattctcggattggattatcttctgatgcacttctgtttagtcaacagacagatattggtgagttgatcagaaatgaaaataagcaggcaaaagtgcattgtgtgcttattgatgagtgccattttctcacgaaagcacagattgaacagatatgtaaggtgactgattatgatgatattccggttctttgttatgggctgagaactgatttcagaggcgagcttttcagtggtagccagtatcttctagcatgggctgataagttagttgaattgaaaactatttgctattgtggacgcaaagcgaaccgtgtattacgttttgatagcgaaggtgcggccatttatgatggcgagcaagttgatatcggtggtaatgaaaaatatgtgtctgtttgccgtaagcactatatggaggctattaatgaggcgaggaaaaacagaaaagacagcgtgtaatggatagatttctgtgaagcgattggatgttctgtttgagagtttgtattaagaatatacccaatggatttcaagatggatcgcgacggcaagggagtgaatctccgggagcatagataacgatgtgaccgggcagccaacaaagaggcaacttgaaagataacggatatagagcagcgtaagttaaaggatgctgatatcagcacccttaagtagtatttaatcagttaataaatttgttcttattggcttttttctgttgcaacggtttctgtgaattctcgtccatagtatgaatccaacagcaattgttttagctcagaaatcagcgggtagcgtgggttagcaccggtacattggtcgtcgaaggcatcttcagataacttatcaatttttgccagaaagtcagcttcttgaacgcccgcttcacggatagatgtcgggatacctagctcagacttgagctctttcagccaggctaacagtttttcaatttttgtgacagtatggtcacccgtagccgataaaccaagatgatcggcaatttcagcgtaacgacggcgggcctgtgggcgatcatattgactgaatgcagtctgtttggttgggttatcgttagcgttatagcggataacgttacaaatcagcaatgcgttagccaagccatgcgggatatggaactcagaacccagtttatgcgccatagagtggcatacccccaagaaggcattagcaaatgcaatccctgcaatagttgctgcattatgaacccgttcacgggcaactgggttcgtggccccttcatgatagctggttgggaggaactctttcagtagttttagcgcttgcagtgcttgtccgtcagagtattcgtttgctaagactgatacataagcttctaaagcgtgagtgattgcatccagcccaccaaaagcacagagtgatttcggcatatccatgactagattggcatcaacaatagctatattaggcgtcaattcataatcagccagtggatatttctggccggttgcatcatcagtgacaaccgcaaatggtgtcacttcagaacctgtgccggaagttgtggtaatggcgaccattttcgctttaacccccattttggggaatctatagatgcgtttacggatatccataaaccgtagagctagctcttcgaaatgcgtttcagggtgttcatacatcacccacataattttggccgcatccattggggaccctccccccagagcaataatgatgtccggtttgaatgagtgcatttgttccgcacccttacgaacagtgcttagggtagggtctgcttcaacttcaaagaaaacttctgtttctatcccgtgggatttcagcacatcagtgacttgatcagcataaccatgattaaataagaaacggtctgttacgataaaagcgcgttttgcaccgtcggttgcaacttcttctaatgccacaggcagggagccgcgacggaagtaaatggatttcggaagtttatgccacagcatattttctgctcttttcgccacggttttggtattgatgagatgtttgggccctacattttcagagatggaatttcctccccaagagccgcagcctagtgtcagagagggggcaagcttgaagttatagagatcaccgataccgccctgagaagcaggagtattcacgagaatacgagctgttttcattttatcgccaaaatacttgattcgtgcggcttgattgtcctgatcggtatacaagcaagaagtgtgaccaattccgcccatttcaaccaatttttctgccttttctacggcatcttcaaagctattaccacgatacatagcgagcagtggagacaatttttcgtgagcaaagggttctgcttcatcagttaagctcacttctccaatcaagatcttggtcttttcaggaacattaatgcctgccatttcggcaatttttgttgcagattgaccaacgatttccgcatttagactaccgtttttcagaatgatatcttgaacagctttcagttccttgccttgtaacagataaccgccatgagtaaagaaacgtttacgcacctgatcataaatttcatccaccacgataacggattgttctgaagcgcagatgacgccgttgtcaaaggttttagacatcagaatagatgcaacagcgcgtttaatatcagctgattcatcaatgacaaccggggtgttaccggcaccgacgccgattgcgggcttaccagagctgtatgccgcttttaccatacctgggcctccggttgccaggatgagattgatgtcttggtggtgcatcaatgcattggaaagttcaacggagggttcatcaatccagccaataatatcttttggcgcacccgcggcaaccgcagcggatagaaccaattctgctgctttggttgttgcttttttggcgcgtgggtggggtgagagaataatgccgttacgggtttttaggctgatgagggccttaaaaatagcggtagatgttgggttagtggttggcacgataccgcagattaagccaataggttcggcgatagtgatggtgccgaatgttttatcctcagacaaaatgccgcaggttttctcatctttataagcgttatagatatattcggaagcaaagtggtttttgattactttgtcttcgacaatgcccataccggattctgctacggctaattttgctaaagggatacgtgcatctgccgctgcaagggctgctgcgcggaagattttgtcaacttgctcctgagaaaagttagcaaattcacgttgtgctttttttacccgagcaacgagttcgttcagttcagtaacatgagttacagtcataaagaagtactcctggaaaatattaaaaaccctttaatatcaatgaataagtattttttagaccatttaattgggtgattttttggtaactacaggttaccatttggtattaaatatatattgatcttaatcacataaattcccaagctgattcctttcagcttgggtcagtgataattattattgattgggttgtaaatagcgttaaaaggttgaatttttaatctaataaaaatatcgggttaacaacttgttatataagatattttaaattaaaaaaagcgttgtggttgatggaaaagggaacttctccagtataaagtgaagaaaaaattaagttttatatgatctttgggagagcaatcatgagaatgtttttaacaacacagcgtaactcaatagaggttcttcgtgggtgacttactgctggatctgccaggttacattaagttttttgttgggctatttgcactggtcaatcctgttggtattttgccggtttttatcagtatgactcactaccaagcccaatcggcgcgtaatagaactaactttattgccaatatttctgttgccatcattttatggacagctttgctgttaggtgacttgatactgcgtatgtttggcatttccattgactcttttcgcattgccggtgggattttggttgtgaccatcgcgatgtcgatgattaacggtaaacttggagaggacaaacagaataagcaggaaaaatcagaaacagccgttagagaaagtgtgggtgtggtgccgttggcattgccgttaatggcaggtcccggtgcaatcagttcttgtattgtctggagttctcgttatcagggatggcagaattttattgggttgatgcttaccagcgcgttgtttgctttttgctgttggttattgtttcgatctgcacctttagtcgtcaaatatcttgggcaaacaggcattaacgttatcacccgaattatgggactgctattgatgtctttggggattgaactgattgtgacagggatcagagcgctattcccagggttgctttgatatgatttacgataaaaggtgctagcttcctttctagtgaaattacaaattataatattcttatcatttttattataaagcctatttcataggcttttctcccttcttttatcggtacttcctgaattttatacaaataacccaatatttttctaaattattctttcctgttagttcaatgtgtaactggttgcttccaccactgttttgtgatgaatgtaggtttttaatttgcattgattgcaatttgttaaaattatgtttattttcatctttagtctagctttgtttactattttatttaagtgttaagttgataatgctatatacatcaattagttataatgaattttggggtattttatcaattaatgtaataagtcgtactaagttgtttgtaaggatgatttttgcaatatgagagcgatattttaacaattgatatgataagttgcctttaatatttaatccgttactttgggttaaataatgtgaagataccggccttgatgggatatgtggaatgaaccggtccatcaaactggaggtaaaaaatgaagatcaaacgattaaaattacataagtttatttcctgtatatttttattatcggcgttttctgttacagccgtgtctgccgctgaacttccagatggtgtgaaacttgcggataaacagcagattattattaataatggcgcagaagttgcctcgcttgatccacataaagtcgaaggtgtaccagaaagcaacattattcttaatctcctggaagggttagtgaggacgggttctgagggagaagttgtgccaggcgttgcgacccattgggaaaatcaggattacaaggtatggactttttatttgcgtgataatgctaaatggagtgatggaacgcctgtcactgcccacgattttgtctatagctggcaacggttagctgacccaaaagtgggttcaccttatgccagctatcttcaatatgcttacgttgaaaatattagtgatgttctgaagggtaaaaaattgcctgatcagttgggggtaaaagcgctggatgatcatcgtttgcaggtgactctgacgcaccccgtgccttatttcgtcagtatgctcagccatacggcaatgaaacccgtcaaaaaggatgtggtcgaaaagttaggtaataaatggacgctaccagaaaactatgtgggtaatggggcgtatctgttaaaagagtgggtggtcaatgagcggatagtgatcgaacgcaacccgcgatattggaacaatgcaaaaacagttattgatcaagcgactcttttaccccttcaatccgaaaccagtgatattaaccgctatcgtagtggagaggtaaatatcaccaatagcgccattccgccgactctgtatcagaaaatgaaaaaggagctccctgaacaggttcgtgtcagtccatatctttgtacgttttattacgaaattaacaacaaaaaaccgccatttactgatgttagagtccgcgaagctgtcaaattaagtctcgaccgggatattatcgctggaaaaattatggggcaggggcaaatcccggcttatggtttcacgccaacatttatcggtggtggcgattttgttaagccagaatgggctaattggacacaggagcagcgcaataaacgcgccaaagaattgttagcccaagccggtttcaatcaggcgaatccattgaagttcaccttgttgtacaacacctctgagcaaaataaacaacaagctattgctgccgcttccatgtggaaaaagaatctgggagcggatgtgattttgcagaatcaggaatggaaaacctctcttgaaagccgccatcaagggaattatgaggtgaccagagcaacctggtgtgccgattacaatgaacctacagcatttttaaacatgttgttgtcagacagcagcaataacaccactttctatcagaataaaaattttgatagctatctggaacaggcgttaatcgctaaggatgctattgagcgtaagaaattatatcaacaagccgagtttcaactggataaagactcggtgctgattcccgtttattaccgggtgagtgtacggcttgttagcccatcagtgggagggttttcagggaaagacccattggattatatggatattaagcgactgtataggataaaaaattagacagtagctttattcaaaagagttactgagaccctgcaaacaaaatcgttccttttgtatgcaggtggtaatccaccccttatttctgggccgtcggctgataaaaagtctgacgatgtaaaattggagtagaaaaagatgataaacacaacgaaaaagagactacttactgtcagcatcagcgctgcactgagtatgataatggcaagtcaggtctttgcggcaaaagtgcctgatggcgttcaattagcggataaacaggttttagtccgtaataacggttctgaaccgcaatcgttagacccgcataagattgaaggagtaccagaatcacatttggcccgcgatctgtttgaaggggtcgtcatcgttggtccgaatggcgaaattttaccaggttctgcgaccaattgggaaaataaagacttcaccgtctggacattccatatgcgtaaagatgctaagtggtctaatggtgatcctgtcactgcgcatgattttgtttacagttggcagcgtctggctgatcctaataccgcttctccctatgaaagttacctccagtatgcccatatcaccaatattgatgacatcatcagtggtaaaaagaaaccagatgctctgggagtaaaggcgctggatgactatacattgcagcttacattgagcgaagcggttccttatctaccaaggcttttggctcactcttcaatgtcaccggtgcataaagcgacggtagaaaaatatggcgaaaaatggactcagtcgcagaattttgtcggtaatggggcttataaactgaaaaattgggtagttaacgaacgtattgtgatggagcgcagcccaacatattgggataacaaaaataccgttattgatcaggttactttcttgccaatttcgtcagaggtcacggatgtcaatcgttatcgcagtggtgaaattgatatgacttataccaatttgccgattgagctattccagaagctgaaaaaagagatcccgaacgagttgcacattaacccacaattatgtacttattattacgaaattaataacgaaaaacctccatttaatgatccccgcgttcgtactgcactgaaattggctatggaccgcgacattgtgaccaataaagtaaaagcacagggtgatatcccggcttccggttatacaccgccagtgactgatggtatgaaagagatgaaaccggtgtggtttactggttggagtcaggaacagcgcaaccaggaagccaaaaaattactggctgaagccggttataataaagataatccattgaaatttaatttgctttataacacatctgatctacataaaaaaattgcaatcgcggtagcttctatttggaagaaaaatttaggtgctgatgttcgtttagaaaaccaagagtggaaaactttccttgatacacgacatcaggggaattatgacgtggcccgtgctggctggtgtgccgattacaacgaaccttcttcattcctgaattcaatgctttcttacagtagtaataacacggctcattataagagtgatgagtttgataaactgatgaaacaatctctgaaagtggcaacagatgatgaacgtgctgctgtttaccagcaagcagaagcgcagttagataaagattcggctattgtccctctctattactatgtgaatacccggttagtgaagccctatgttggtggctatacagggaaagatcctttggataatttacacaccaaagatttttatattatcaaacactaacgttgtaaagcagcccggagagggctgctttagggtcaaattattttaaggccagggttgagggccaacacataggaacgggcgatgcttaaatttattttacgccgttgtttagaggcgatcccgacactttttatccttatcactatttcgtttttcatgatgcggttagcgccgggcagcccatttaccggtgaacggaaattgccaccagaagtgctggcaaatattgaagcgaaatatcatctgaatgatccaatttataaacaatattttgattacttaattcaactcactaaaggagattttgggccctcttttaaatataaggactactctgttaacgatcttgtggcaacagcgtttccagtatcggctaaattaggcgtctcggcatttatcatggcggttgtcttgggggtcagcgccggggttattgcggcacttaatcaaaataccaaatgggattatacggttatggggttcgccatgacgggggttgttatcccggggtttgtcgtggcaccgttactggtgctggggttcgctattcatcttaaatggctaccgggaggaggctggaatggcggtgcgcctaaatatatgattttgccgatggtggcattgtctttggcttatatcgccagtatctcccgtattacccggagttcgatgatagaagtgctgcactctaactttattcgtactgcgcgagctaaagggttgccattgcgcatcattattttccgccatgctttaaagcccgcattattaccggttatctcttatatggggcctgcttttgtcggcattcttaccggctcaatggtgattgaaacgatcttcgggttaccgggaatagggcagttgtttgttaatggcgcattgaaccgtgactattcgttggtgttaagtctgactattttagttggtagcttaacgattctgttcaatgcgattgttgatgtattgtacgctgttatcgatccgaagattcgttattaagactggagcacgcaatgatagttaataaacaaaatagcgaagctctggaaaatttctctgagcaattagaaattgaaggccgtagtttgtggcaggatgcacgacgtcgttttattcacaaccgggcagcgattgccagtttgtgtctgctatctttgattactttgtttgtgatcttggcaccgatgttagctcaattcacttatgacgatactgactgggccatgatgtcgatgcgacctgattttgaatctggtcactattttggtaccgattcttccggccgtgatttactggtgcgtgttgccattggggggcgcatttcattaatggttggggtggcagccgctttggttgcggtcgtcgtcgggaccttatatggatcattatccggctatatgggcggaaaaatagattcagtcatgatgcgtatgttggaaattttgaactcatttccatttatgttctttgtgatcctgctggtgaccttcttcggacagaatatttttctgatatttatcgccatcggtatggtgtcatggttggatatggcgcgtattgtccgcggtcagacactgagcttgaaacgtaaggagtttattgaggcggcgttggtgtgtggtgtgccaacccgtcatattgtgctgcgccatattgtccctaatgtgttgggagtggtggtggtttatgcctctttattggtgccaagcatgattctgtttgaatcatttcttagttttctgggattgggaactcaagagccgttaagcagttggggcgcattgttaagtgatggtgcgaattcgatggaagtttccccgtggttgctgatgtttcctgccggttttctggtggtgacactgttttgttttaactttatcggcgatggcttgcgtgatgccctcgatccgaaagatcgttaaggaggtaacatggacagcgttaaaaaccagaaaagttctgagccgttgttaattgttaaagagttggacgtgacttttagcacccctgacggggatgttaccgcggtgaacaagctgaattttgatttacgagcgggggaaacgctgggaattgtgggtgaatctggttctggcaaatcacaaaccgcttttgctttgatggggctactggccagaaacggcaaaattggcggttccgctatttttaatggcagggaaattcttaaccttgaagagaaagcgcttaaccgcatgagagcagaagagatatcaatgatatttcaggacccaatgacatctctcaatccctatatgcgtatcggcgatcagcttacagaagtattgatgttgcataagcatatgagtaaaagtgaagcataccttgaatcgatacggatgctggatgccgtcaaaatgccagaagcacttaagcgaatgcggatgtatcctcatgaattttctggtgggatgcgtcagcgtgtgatgatcgcgatggcgttgttatgtcgaccaaaattgttgattgctgacgaaccgacaaccgcacttgatgtcacggttcaggctcagattatgactttactgaatgagctgaaacgggaatttaataccgcgattattatgattactcacgatttgggggtggttgctggtatttgtgacaaagtgttggtgatgtatgcggggagaacgatggaatatggttcggcccgtgaagtgttttatcaaccaacccatccttattctattggcctgcttaatgctgttccacgtcttgatggtgatgaagcatcgttgacgaccattcccggaaatccacctaacttattacggttgccgaaagggtgtccgttccagccacgctgccagttttcagtagatcgttgtgtaaattgtgatccagggttagagacatttggcaacgggcgtttgcgagcttgttttaaagcaccgggggaattggtatgagtccgattgaagaaagacgtgtgctgctggaagtagcagatctgaaagttcactttgatatcaaagatggcaaacaatggttttggcaaccaacaaaaaccttgaaagcggttgatggtgtcacattaagattatacgaaggggaaacccttggtgtggttggtgaatccggttgtggtaaatcgacttttgcgcgtgcaattatcggattggttaagtcttccggtggttcggtaacgtggttgggaaaaagcctgctggatatggatgataaacagtggcgggatattcgtagtgatatccagatgatattccaggatccattagcatccttaaacccgcgaatgacgattggcgatattatcgctgagccactgcgcacttatcatccgaagatgaaagggctggaaattaaagagcgggtaaaagccatgatgatgaaggttgggttattaccgaatttgattaaccgttatccgcacgaattctctggtggtcaatgtcaacgtattggaattgcccgtgcacttatccttgaacctaaattggtgatttgtgatgagccggtatctgcacttgatgtatccattcaggctcaggtcgttaacttgttgcaaaaattacaacgagaaatggggctgtcgctaatttttatcgctcatgatctggcggtggttaagcacatatctgaccgtgtactggtgatgtaccttgggcatgcagtggagttgggtacttatgatgaggtttaccataatccacagcacccttataccaaggcgttgatgtcggcggtaccggtgcctgatccagataaagaacgaaataaacacattgaattgttggaaggggaattaccgtcacctatcaacccgccatcaggatgtgttttccgtacacgttgcccgatggcagatcctgaatgtgctaaaacccgaccattgatggaggggagtttccgccatgccgtgtcttgtttgaaggttgatccattgtagttattgagggacactcaatgtgagagttacttttggggttttatatcaggattcagacctgccttaaaacgggtagctctcactttttgcataaaaaagagcagatcaaaataactgactttaatttttcactctttccacaaaatatggtaaatcgggtgagatttttctcgacaaataaggatgcgggcaaaaacatcgttgatctcagcatcctcagattctgctagcccgataatgacttcggcaaagaaatcagggtttggattgaaatccacgtgtttaagccacccatcagaagggggcagtaattctgcgccgccacgtatttcgaattgtaagctaaatagcagaatatcagcggggtcaaggttgaacgaagccagttcgagaaagatgtcataggctttctcaagggtttcatcttctgtcatgcggttattgaggtctaaatccatagcttgtggagatctgttgtccatattgatttattcgtaggtcatgatgaagaattaaagcatgttgaagcgttgattggtacccccgtctttacaagacgagggtattggtcacagtagcgggctaaagaagtaacaaatacgctcaataatccgatgccacaaagggcgttgttcccactcatgagtttccagcaatgtagaatgggcgatataatcgtattgcaccagcgtcagatcattaccaaagttttcatcatcaatcaccacggtaatttcgaaatttagccacaggctacgcatatcgagattaacggaacccaccatgctgagttggccatcaactaaaacgcttttagtatgtagcaatccatcttcaaattgataaatcttaacaccggcgtttaatagttcagcaaaaaatgcccggcttgcccaacgaactaaaaagaaattatttctgcgtggaacgataataataacctcaacccctcgtaaagcggcggtgcaaatagcatttgtcaggtcatcactgggaacaaaataaggggtagttaaaatcagttgcttacgggcagagaaaatagccgtcattaaagattgttgaatcaactcctcagggaatccggggccggatgcaataacctgagttgtgtgtccactggcctgttcaaatggcatgatattgttatctggtgatggcggaaagatacgttgacctgtttccatttcccagtcacaagcgtaaataacccccatggttgtagtaaccggtccttccattcgtaccatgatatcgatccattgcccaacaccggcatcttgtttaaaaaagcgtggatcgaccatattcatactgccggcataagagatataatcgtctatcaagataattttacgatgctggcgcagatccatacggcgtagaaatagacggaatatattgacttgcaaagcttcaacaaattcaattcccgcctggcgcatgatatccgggtattggctacggcaatataaccagctaccggctgaatccaccataatacggcatctgactcctcggtgtgctgcggccataagagcatccgtcacttgctcaaccaagccgccggtttgccagatgtaaaacaccatatcaatactgtgtttggcattctcaatatctttgataatggtttttagtgaatggtcataggttttcagtagttggatcttgttacctttaacacccgccagcccttgccgtcgttcgcaaagctggaatagtggtgtcgcgacttcgctattttctgtcgcgaagatatggcgagatttgcgcaattcttcaagccatacggttgttgaaggccacatggcttttgcttgttcaactctgcgttttcccaaatgcagctcaccaaatgacaggtaagcgatgattccaactaagggtaggatatagataatcagcagccaggtcatagcagaagtgaccggccggcgttttatcagaatgcgtaaagtgatactggcaacaatcagccaataaaagaaaatagcaagccaacttaggacggaataaaaggttgtcatattcggcaatcaatcctgttttgttcagacatctttggtggcgtttaacgcggtttcctcaagactcgggatatacctgttatctttcaagttgcctctttgttggctacactctctcaccccggtcacatcgttatctatgctcccggggattcgctcccttgccgtcgcgatgcatcttgaaatccatagggtatataaacgatctaattaacttggtgaatttaccaaaaaatcggcaaatatactgcaagcatcatacttgatattggtcatttcgcattattgatacaaaaagtactatccagatacgccttggatatcttttttaaaggcttataatgagcgtgatgtttttataggtaggttttatgaaacgtagtcggaatgaagtagggcggtggcggatgttacgccagaatctcaaccgccgtcgccgttggttggaagggcaatcaagacgtaatttgcgtatttattcactacgtaaattagatggttataaacagcgtcgagctttattgtttgttcagcatggcgaatggatacattgaaaaaataatatttttggccttatattcacgctcacctacaatctttattgaatatgattgctatttgcatttaaactagcagtcattcgaggattgactttatgctgctaatcaagaattcccttatgcgctggatacattggccaatattgttgtcagtttgtttacacgtttctgttgctgccgcacttttttgttctgcaataccggaaaagcagcctgatgctgcacttatgtctgttgctatgattcagttagctgccgaagaagcgcctgtttcagaaccggcagcaccagaacctgaatcagagccagaggagccggaacctgttccagagccggtaattccaaaaccagaggtgaagaagctaaaaccggaagtgaagaaaaagattgttaaaaagcaatctgaacccgttgaaaagagggctgagcaaccggaaaagccgttgtttaatcagaatgcattagctaaccgtactgataataatcagaataaaccggtggttaaaccgcagaatgggccaagagcattaagtaaagcgttacctgtctatccatccagagcgtcagccttgggcaccgaaggttatgtgaaagtcaaatatgatattgatgaagacggacgggtaaaaaatatagaagtgattggggctaatccacctaatgtttttgaacgggaggtgaaaaaagcgatgagaaaatggcgctttgaaaaaatacccgcgcttggttatatcacaaccgtcgaatttaaaattacgggtatatctcaatcctgattgtcggggaaatgcaaaataaaaaaggagcattattaacacgctcctttttcgattaatgtttattcgctagtactgctagcgagttgaaagtgggttttaccttctggtaaccgacgtgaagtattatcttcatttaccgcaacataagtgaataccgcttcggttgcacgatagcgttggccgacaggttcagaggcgactttcttcacccagacttcaatgttgatggtaatcgaactgttaccggttttgaggcaatgtgcatagcagcagacgacatcaccaacggcaacaggtttcaagaaagtaataccatctactctgacagtgacaacacggccttccgcaatttcttttgccagaattgcaccaccaatatccatttgtgacattaaccatccaccaaaaatatctccattggcgttggtatcagcgggcatagccagtgtgcggaggactaactctccgttaggtaattgttgttgtgtcattgaaaactttactttatttgatgaaaaaacaatacctgcctacagacgatagcaggcaggtatccatttgaatagggttacttctgttcgcgtggcaggtgacggtaaatatatactacactgagcacggtgaaaaccagagtcagggcagtcagaccaaatactttaaaattaacccagacatcttgtggtaaccagaatgcgacataaatattagccagcgcgcaggctgtaaaaaacagcgcccatgccatattgagtttattccagacaagatcgggtaaaattaactcttttcctagcattttctgaataagtggttttttcataaaccactggctgcctagcaaagctaatgcgaataatgcataaattacagtgactttccatttgataaatagatcactgtggaaagctaaagttaacgtaccgaaaacagcaaccatgataaacgtgatcagggaggctttctctactttccggtagatgaaataagtcatcgcgacagctaaaccggtagcggcgatcaacgccccggaagcgtagaaaatgtcatacatcttgtatacgacaaaaaagacgactagaggtagaaagtctaaaagttgtttcatatttgaacctattgtaattccggcatctgattatcatccgataatggactagcagcaacagtatggttttatctttcaataaaaaaggtttttatcgatcggtttcgcacaattttaccataaagagcggcgtaattaacttccggttgtcagtgaacatataaggcagcattataacgaaaacccgttgaaaaataagagggcataaaccagatgcagtggaaaaaactacagcgttggatgccagggttgggcaatttttctcattatcgcaaggaatggtttagtcatgatttaagagctgggctttctgttgccgcagttgctctgccagttgctattgcttacgccgaattgatgggaataagtgcaattatcggtctttatgcatgcattttacccatgttcgcttatgcactatttggtacttcaagacagttgattgtcgggccagatgccgcaacgtgtgccgttattgcagcggctgtcgcgccattggtttttggtaatgaagatgtacgctggcagctcacgatcgtaatgaccttaatgaccgggatatggtgtgttctcgccagtcacttccgattaggcgcgtttgctgattttctttccaaaccgatcctgaaaggattaatgaatggtgttgcattgacaatcattgtggatcagctagctaaagtctttggttttgctggcgttccgatgggattgattgaacgggtgatcgcattacctgccaagctcatgagtacacatttaccgacgttagcaatgtctgttgctatggtattgattttgctcactgttcgtttcttgcgcccgacttggccggggcctttgttagcaatggtattagcgacttatataagctggcaatttgatctggaaaaatatggcgttcagattgttggcagtgtcagcggtgggggattacctgttgtgccaatgcccgattttcagcctggcattatgcgtgagctagttatcccatctttgaaccttgctgttatcagttttgtcagttttatgatgacggcccgtagcttcgccagtaaaaacggttatcagattgatgcagattgtgaacttagggccttaggcattgcgaacattgcttctgctttatcacaaggatttgctgtcagtgctgccagcagtcgtactgcggttaatgatacgattggtgggaaaacgcaattggtctctgttattgcagcgaccattattttgctggttttgttatttatgactcgttttctggcttatatcccattgtcatctcttggtgtggtgctgatttattcggcatcgtcattgttaggcttacggcagatttggtcactgaggaaacgaaatcatcaggcatttactttatcactatttacattcattgccgtgctggtggttggtttgattaacggtgttggtttcgccgttctgctgggtttattacagtttttgcgaattatattccgcccgacagatcaactcttgggagtgaatgaccaaggaatgattcattcaattaatcatggcaatgatattaaaccaatagatggtgtgatgatgtaccgatttaactcgccattgacttatttcaatgttagctattttaaaaaacgggtactacagcatgtcgacagaattcaaaaaattaacaaaacgcaaaaacgtccgggttggctggttgtcgatgcggctgttagttttacccatgatgatgtcagtgtctttgctgctattgatgagttgattagtgaattgaaagtaagagatatcaccttggtgctcgccggtcgtcggacagaacttacccgttggataaaacagaataaactgcgaagtagtgatgacgatctgattgtggtgcccgatctctattttgcggtccgaatgattcaaagtaagcctgaatggtactctaattacgctaaaagatataatagcgttattgaaatcaaccaatgaatacgataaataaaataataacattgatgattataatcgagaaaaatagttcttaattcccgaacgtatgattattgactgctgctcttctattatctgagatatcagatcctgaatacctgctttatttaaaaatttcttgttaaaaaacaatatgattggaatattaagtatttactaccacgttacattttgtttttcgataagtatattttaacaaagcaaaatcatgattacttgtacaataactatttaggacgttccaatgaaaaaggcattgatagcctcagcagtggcagtgggtttatctgtattcgcatttgcagcaaatgctggtgaacatacgatttctggtggatatgctcagagtcatgtgaaagttgatggtgaaaagcttgatgaaaacccaaaaggctttaacctgaaatatcgctacgagctggataataattttggtgttattggttcatttacgctgacacatcagggttatgattactattatggtagtagcaagattggtactggtgatttagattattattctctgatggctggtcctacatatcgctttaatgagtacgtgagtgtatacggtctggtgggtgctgcacatagaaaggtaaagggtgaattttctgcctatggctatgactttgaatataaagagagtaagacctctgctgcttatggtctaggattgcaatttaaccctatgccaaattgggttattgatgcatcttatgaatattcaaaactgggtgatttcaaagttggcacttgggtaattggtgctggttatcgattttaaatagtgtttccaatgtagtcgttcctttaaagggaattcagtccaacttttgtgatctgtgcaatcacattaagtgactgaagataataaatgaatgttagaaccaactctctgttagcttgttagatagtttatctattaagtctatcgaaataatgaaaatagagagaacatattttcatcagggattattgaaagcgggtatccaggtttagccatgtaatctgaagattattcctttattagttatcactatctattctatacaaaattccctgtggtaaaacagggaatttttttgcgtttattccaatagtaataaagaactaataagtacgaacaatagtcgattgcagtgggaagatttccatgatacagcggagcagtcactagtttcttagttaaacgggaaattaacaataaacgagattgagttgttttctattgattgttgataaataatcgcgcctcgtaattaatcttttctataattttatataatattagggattttcaatgaaaagaacattagtggcttcagtggtagcggtaggtttatctgtatttgcatttgcggcaaatgccggtgaaagtacgatttcgggtggttatgctcaaagtcatgtgaagtttaatggtgaaaagattgatggtaatccaaagggaaagggtttcaacctgaaataccgctacgagttggataataattttggtgttattagttcattaacatatacccacaagggtttcgataaatttgatgtgaattattattccttgatggcgggccctgcatatcgttttaatgactatgttagtgcatatggtatgattggtgctgcacgtggagagtttgaagttcctgttttgaatgggtcatataccgagggtaaatcatctgttagttacggactgggattacagtttaaccctgttccaaactggactattgatacatcctatgaatacgcaaaatttaatgacgccagattgggtgaccttaaagtaggcacttgggtagttggtgttggttatcggttttaatagaaatttgctaatttgtacttaatttagctaacttttctacagaaattccctgttatatgacagggagttttttgtgtttatatcaatagcaacgatgtgctcacccagttatcactagcttattctgtttaccccatagttttatcactatggggctttgtttgttatattgatttttgttgtggagaggcaatcagcatatacaaccggtatagataaatcagcaaaatagctgaaatgaggttattaaacacaccgagaataatccctgccatctcgctgtgaatgaatgttaggcggtcaataataaacaccagcaagagcctcgcggtcagccataaaagaattgccggaaccagcaagcgaatattggcaaatgccagtttccagcttattttcatagaagcaaaaacgccgcgacgctcggcagtcataatcacgggtgataacgccagcgcgatcgacaaaataatgcctggtaccagcatcagcattaagccaaattgaatcaacagagtgcagataagcagtaacaggaacagtttcggtaactggcttgctgataaaccaattgcctgtaatgaagagatacgatttcccgctgaaactgccgcaaccagtgtcaatacaccaccaactagtaacacgctaccaatcatgcttgagaaaatggttccgattcccgcacgcatgatcattgattgttgctctggagtcatttgagacaccagctcttgaataccggccttgcctgaggtggcaaacgtgaattctgcttctgtcagcaacttcatctgttcgctgtcaggaataaacaggtgccccaataaggtggtaaccagagccgccagaacggccagggtcagggtacttaacagttgattcttgaaaaagttaaaactgtcacggtacagggtattcgccgtgattggcatgaagacagctcctatcaggttaaacaacaatacataggggatgattgtaccttgttatggggaaacgtggatagtagaaacaagatgatacggataaattaatggttagctgtgattgttgatgacagaaaaaaattcttcacattatattcttaagataaaaataaacataaaattaaccttattaaaacataatggaaatataatgagaggaaagataaaacatcggaatggtaaaaagatgactaactgattaataataaataaactttgatttggatcaagttaaaataattcctaattgaaataataatattatagatatgcggttttactgaaattctttgaaagatgtgatctgtcttggatcataatttctaatatatgagtatattttgattgactttaaatcacaggaatgggatgaataatgaaaaaaatttctgcatttgtattagcagcggcaactttagtaccctcattcgcttttgctcatgaagcgggtgattttattttccgcacaggcactgcaacagtaagacctaatacaggttctgataatgtattgggggtgggttcttttagtgcggataataatacccagatgggtttaactttcagttatatgatgaccgataatattggttttgaattactggcagggacacccttccagcatcgggtaagtttaccgggtgttggtgatattgctaaagtaaaacatctaccgccgacattaatggcgcaatactatttcggctctaaagaaagtagtttccgcccttatgttggtgttggtcttaactatactactttctttaacgaaaaattcaatggtaattcggctgttaaagataataacttacatagtctggacttgaaagattcctggggtgttgcggggcaggttggtctggattatgagttagatcagaattggatgttgaacgcctctgtgtggtgggtaaacattgaaacagatgtgaaatttaaagcaggtgaccagcaatataaaattgatacccggcttgatccgtgggtatttatgtttggggttggttatcacttttaataaaaaaatggggcagattttgccccattttttgtaaccggaactagacacgtccccggatacaaccgataaaatcctatcccagtgatttaacatgattaaactaggcactctggaaaccagaattagtgacaaggataactttcgctttcggattaaccgtttcggccagagtgttcaaaaacgccttctgtatctgtggatcttgttgtttatgcgacggaggcatcattcagggcgttttgtcggtattgatgaaaggcgctaagtcatcccgaaagaaattatgacatacttaatgaacaggcatagcagtgatctcactgaaattgttggcgcaatgagtagatcacataacgttatgcccgtctcattttttctgggaattcctcagtactaaagcagcctctccatgatctattgcagagctttacgggcagactaaagtggtttttgacgaactacgacaggcagcataggtagcgttgcacttgaaagtggaatcgtccattacccttaaatatttgttactgctgaatacctatcaaactagattttccgcaagcctgaatcccatgatatacaaaggagaatgatatcttccatgccgtcttcttgttctacatagatcacgaaaccgggtaaaactacctcctctagcaactttatagtggctaccttcagtaagcattaaatcatcatatacagcagtacctgactgatagggtagataactatcagaagtatactcttcaacatttccagctaaatctaaatgaccaaaaggccccatgcctaaaggaaatatgcctactggagtggcatcaacaataccactttcaatactattacaatggtctggcagaaactcatttccccacggaaactcacgcccattacccccagtagctgcatattcccattgggcttcactaggaatatggaaattcctacctgtcttttcacttagccaaagtgcataagacattgcagcttcataagatacagaataaactggataattagaacgttgatgaggatacataccccatgcccaactatcaggaatctcctgatagccagtatcacctaaaaataggtaatattcatagttggttacgcaatatctagccaaaccaaaagaactaagagtaatttcataagacggtatttcctttaaaatccattcttttaatactccatattgagaatacattgaaacaatttcatctacattatcaggagataaacctagacgtacttttccaccaggaataatgatgacatcaggttcaaatatagaaattctagaatcccctcgaatagcaagtaaattaccagccacatatctatgagaaaaacattcattaaaatctctaatgatggattgtaaagtacaactatctagttttgagtgctcatcatatattttaaataattcccccattaaagtttggtttgttttatcaggcaaacccatcgcttcttttatggttaaagaattaatgtctttattctcaatatttatatgttgagttttaatgccagttaggcttaattccttttcaatcatattttaccccataattaaaaacaaattcatttattccatcatatgttgagtaaataaagtcatgttgtatgtatcttatacttgatataccataaaatgaacgtttttcccataatatccatttgttttcatttaaatcatatacaccaatccagccagtataatttcctatagatatatgattatttttagcatcaaatgctacacattttattgaatgagaacttggtgtttttattatttcataattttcatttctccaaattcggagggttaaatctcgactaacacttacaaacaacccttctttactgccatcacatccattagcaatcttttcatgagctttaggaatatatgcataacatgaaaagtcctcaatgctatgtaatgcaactgctgcattggcacatacagaaaaaacaaattctttagatataaaaactccttttattgcatttttatgtaatgaaactatattatcaacaacaatatcaccagctatttttcttaaaacaataccttctccagtgtatgtaccaacaagacaaaattgattatcttcccatgaaacagcagcgcaatttagaggggaatgatgttcatatataatatcaccagtacgagcattaaatatttttcccatttgtccaccggtaataagcacattttcaaattcgataataaagttacacagacttcccatttcggcaaatggcctattattacagaaaactataccagcatcaccaacactccaaatgtctttgcctgaaacgtatacagcattggaaccgtatgttggtctaacatgatcttgatgccatgcttgagtggaaatggtatattgaacataactatcaccaaatgacgcaaaaactaaattatcactatcaagaaatgcacaagatcttggccaaacaattggaggaagctcggctatatgataactttcaagattattatctttttctttccaaagtttcatttttctatcataactcaagcttaccataattttttgagggaagtcataaaccagacgcttaatacccgcttcatgtgcagatgttatttttaatttaccattaattatagttatgatttcgccattgtcatttccagcataaataaccccatcaggcgtaatagaaatagtatcagtttctatattatcaagatctatacattctatttctttctgataatctacatcccaaatccggattgtaccgtcatcgctggaacttattaagtttccagatgaactccattccacagagattacgtcctctacatgcccttttaactgagctatgacgtttcctttataatcagaaacaataatggttttatctctagaacatgttgccacaatatttttatttgggtggaatgatactgattccacatcatcagtatgcgaattgataattccatataatgtcatatctggcaatagccaaatacgacaagtataatcactacttactgttgctatataattaccacatgggctgaaagcgcactgatttaccaaatggtcatgatatactcgtctaattggtttcttattataagcatcccataaaatgactttattatcatatccagcacttaaaacaaatttattaccataagtggcaacaccactgataggagaggtatgtttatgcatagaatatatcctttatagttcaagagcatgaaaggtttttatttttttagcagtcaaataatttttatttttttcatttaagaatgtcttggtattaataacttcatatatttcaattccattctgagtaatttgatgtattttatctggattattagttatcaaacgaatttttgaaatattcatggccagtaacattttagccgcgagagaaaaatcacgataatcatctaagaaaccaagagcttgattagcttggtatgtatctaacccattgcgctgtagcttatatgcatctattttattatataatccaattccacggccttcctggcgtaaataaattaagactcctccatgaatatcaatttcttttaaagattcatttaactgctcaccacagtcacataaaagagagtgaaatatttctcctgtcacacattcagaatggatcctaaccaaaggtatgtgtttctctgaccattttcctatacgtatagctaaatgctctttatcctgggtaaatccattaaatgatataaattcagattcattgttaatagatttcaacggtataaaagtactatttctaattgatatattattcatattaagatattcacattgacattatagaaaataaatatagatatcataggtataaatctattaggacataccatatttaaaatcacgtaaatttataggatatttagctctaaactcctttagataataagcatatccatgcaatacctttatacaatattctattctatttaataattgtgacggtataaataacttttcaaaataatagatcacttggagggaactcagtccgatttttgcgatctgatcaattgcgaaaaatcccaaaccccaacacggactgagtgatgcctatcatagcacctatacctcaagatgaatgccagaaaatgagaaaacttatccataaaacccgtgataagaactattcccgtcgattaaccgcgttattgatgctcaatgaaggattgacagtgacttatgtcgccaagacccttcatgccgcacgctcttccgtcaatcgttgggttcagtggtttacattatatgggctggaaggactcgaaagtttacccgttggccgacctgttgtctgggatctctccccactctataacctcttacttttcttattacagcaatccccccaaaagttaggctatctccgctctcgctggagccttgaactcatgactcataccctcaatgaattactcaacctctctctgacgcaaaatgtcctttatcgttactttgctcaggtggggattgtctggcgtagagcggcacccacagtgaaacaacctgatcccgaatacgatgagaaaatggcaaagatcgcggaagccaaagcgaacatttcagaaaaacatcccgttttttatgaagatgaggtggatattgatctaaacccgaaaatcggcgcggactggtgcttcaaaggacaacaaaaacgggttatcaccccgggaaaaaacgaaaaacattaccttgcgggctgccttaatgcccaaacagagcaaatcacctatgttaaaggaataaaaaagaattctgatttatttatcaaaatgttagatgaactgaatcatcaatatccccatgcggaaaccctcacattaatcttagataactactgtattcataaaagtcagaaggtaaaggactggctggcacgacatccaaaatttaccctgttgtttttaccggtctattcaccgtggctaaataaaatagaacggttatggcaatcgctccatgagacaataacgcgaaatcattgttgtcaatttatgtggcagttactgaattatgttgatgcctttttggcatcgttttcatcacagcaaaagccaggaagacaaaaaatgggtgtagcacaattatgaaatcttatttatctatatcgccctctttttctatattacgcaacaccaaatgttcgggtataaaacagattttattatttttatatccagatgaccttaattcagaaatacaaaaagcgccaccatttccagaggatattgacactaacaatgctggcttatgcactaattcgttatcactacataataaaagtaaattttttagttttggtggaaccattcccccccattcaggaactacaataacaaaagcatcagaattcatcaaagattgtgatattaaaccccattcatgccatttaggatcttttacttcattccaaattgactcatcccatattggtatgtttaaatttcccagatggaaatgctcagtatgtttaaatgtttttttggttatttcaagtgaatctaagaaatcaccaactttacctgaattagaatgcgatctatgacttcctgaaataattcccaatttcatttcatttcctcacgttatatattttgaataccttttaacaccaatatcaaaaaccaatttcgctataaaaattaaaattaatgtgaccagagtctgaataaaaaaccatttcatactcattattccacttactactgaagctggaacacccgttataaatagacacggaagtatgaacattaaaataaaacgaactacaccatgaaaagattgttcaggtctcaccaatactttaaaacaaggatttgagttcttaatactaactaatgacgttgtccaaaatattgttgttcttatgatccatgtaattgaagtaagtattaagactccttctaataccatgataaaatgtaaaaaaaccaacaaaatattagtgccaaagtaaatatgtacagtaaaaaataatactaaagataggaatgataataaaaaatgctcaaatgcaatatttgtagtgacatataaaaattgagtgtttataggtagcgttaaatgaggttctaactttaatgacttgacttttttaaccagcaagaggcttcctctaccaaataaaaaaagataaagattatcgactaaacataccgtagtaaaaaatataataataaaaccatcagataaaatataacctgaagattgtgagtttaaaatagcataccaaaaaaaagcttgtgctatatagtaactaaaattaacaaaagcggataaccataaatttaatggacttttttttgcttctgacaatccacttttaaagccaatcaatataactctaagcattaccattatatccttgattgtattttaacatataattccaaataaaattaaaaatcatcattaaacacatcatgactaaaaacccattaaatataaaataaatagatattgagttcgttgcaattttaactggaatataggtaatgtattgaaatggaatataattaaatattgattttaaagaatcaccaaacacatctaatggaattaacgcacctgaaaggacccatgacaaagtatccttaataattataaaagagtacgagcctctaaatttgaatgccatacatgacaatatcattgttaagtacaaattgataaacaatcctatacataacgaaataaatagatatataaaattaggaatgtccttttggtatataattataaataaaattaatggagacattataaacaatctggctaatacttgtcccaaagcatattctgaataatataatagtattgattttggcattataattagtctatctgtactaccatcttcaatatggaacgataaattttctggaaatccggtgatacttgttaattgaaatataataacagaccataatatataaactatcatctcatcatgcgtatagttaacaaaaccatttgattttgtcatggtatcccaaaaagatagttcaaccgcatataatgttacaattataaataagtaaccaaatattatattcttcgccctaatggtctcaataaaagaaaatttagttatcacagaaaagtccctctagatatagagcattcttttctttcgaattatttttatttagatttatttttgatatttcaccatccttcaagaagataatgtctttgcaaatgtccgcaatatctatcatattatgtgaggtaattagtattttactttcattattttgagcataatcttttaatatatttcgtaatagaatttgtgactctatatctaatccaattgttggttcatccaatatcagtaattttggtctattaagaaagtgtattaataagttagatttcactgattgacctaaagaacacgtttttgcaggtttttttgctatacttctaaggttcaacatttctatcatattctcaacactatttttatcataattacgtttatatatcttagaaaaaagctcaatattttcatagagagataattcctcccaaagcattgatttatttccaaaaacgataccaagattagataaaagattaaaaggtcttccatttgaatcaataccaaaaacagtaatatttccagagtttggagttaaaataccggaaatcagctttattaaagttgtttttccggcaccattcttccccagtaatcctataatattgttatcgtcaaatatttcaatatttatattttcaaataaaaccacttcgatttcatttaatgaaaatatatttttaaaaatattttttttaatttctctacttttataactaaagcataaatcagtaatttttatcatttcaattcactatttttgtaagtaatatgtcattgtcatgcatgatatattcttttactttactgtttctaccataaacaataaatttttctttatctatattcattattcctttcgcataatcttgatcccaaaataacttacctaatacttcaccagtttctaaatgccaacttaaaatatagcgactgtaacttatccctataataatgctgtcgttgtaagtaataaaatcctcaatggtatttaaaccacctttataaaattcagatatatgctcccatgacttattttttgcatcatatgtaattaagtctatattactggaattaactactgctaatttatttttatcaatccatttcattcttttagggattttactgtctgtatatgctactgcatgatattcatttaaactatcaagtatttttacacttccaactctctctccaatggctaacatacataaatcaaaattaaatgatatagaccatactggctcagacttacttttatatataaccctaacattatctccttctattttgcatacacatcctgattccgaagcaatatatatactattaaaaccaaaacataaatcacggacaggagatttaatattaattattttaaaatcatcatcatgatttttaatcatgatcttaccattagttccacctagcactaataagttttcatttgaaatggctcgttttatataatatccctcgtattctttttttatcctataatcaaaaggctctttttggttattcgatgaaaataaataaccaccatcctctccaaaaaatagatccttatctaaataatttacatatgtccaaaaagccggtggagtctcttttcttaatttctcaaccttttttgttgataaattgaatttaactatacttccatctctgatctgtaatatcaaatatggaatattatctttatatattatatctgaccaccttattttgaatctagcctcgtaaattacttcaattttctctagacttttaacatcaattttatatacttttctatcaaaagatgttccataagcaactttatttatataatcatatgttatatgttcaaaatcatcattagcaaactttggcccaattttataatttaaattatgctcatctaatcgtacaacacatctagcatctgttgctacaatgtattcggaatcattaactttttcaaaccagtgtacagattcgttgatattatctaatttaatagttcttgtggaattatctttaatatctattttcccaaccatcccattaccaaaaccaaccagaatattatcatcctctgtccaacataacgtaacaatatcatataatacgtcaaatctgaaatttgatattatatttttcatgtctgataaatcagctatcatgcatgttgaattaggagatctgaaggcaacctttgtactatcagaattaagggatatcccttggctttcacctctagaaacctcatgtccatcttcgactatgttattcagaccactaaatacaccatttatttttatcttttcagataaaatttcacctataattacatcataattttgtgataaagccgcaaaaactccattctttatgtctattgccataatggttccattagatattttttttcatccaaataatctaaatcgctaaaatcaaaaagtactatttctccagtttttgttcctgcgagtattttatcacaaaatacctttgttgcattataatgtttcattttttcatatccatattatttttattcttttaatgtgaaggctataacagccttcacatctctagatattacttatcgctgtgcgattttaaaggacgaggaacattattacgtacttgcttttgcattttcatattttatctccaatttagataagtttatttgtaaggcacaggataacataatgttaattacccgttgaataatttatagtaaaactaacatttgttgtcaaattataaaacacgtttgttaacaagaattttgaatcacgtcacagagaggaatcattattagatgctatacttactcttttatgtaaaaggctaaaaccaccggcttcgagataaagatagtttgtctttcaaaatcgaattactatgtagatatttataatcaaaaagtcataacgttaagttttgagccattatcagtatatcaatttcgacatatattaccgataggccagatagaatcgttttctctgtttgatgtagatacttatgtgtcgtttggagaaaaaacaataaatactcttcttacagaaaccagtaattgattatttttacgcaagatacgacaacgggcgcgtttgttttttcgtcctctggatgcttttttatttgtccaccgaagctggcaaagccgtcaggctgaagggtgaggcggcaacgcctcaccctactcgatacactatatttttatactacagttgcgtggcagacttcatttttgatacaaattcagtcagttctttcagcattatttctggctgagaaagattttcttcgataattttaacgatggcagaacctgaaatggctcctgctgcgccactcgctaatgtttcttttacctgcttaggttctgaaataccaaatccctgtaacggtggtgcagcatgatattctcgtagtttattgactagatgatttaatggtttttcacctcgtctttctataccggttactcctgctcttgataataagtaggtatatccgcggccataagaagcaatttcacgtaatagttcatcttccgcgtcggggggacaaataaaaatgggggcaatcccatgtttcatggctgcggtacggaatggccgtgattctgacataggaacatctgcaactaataccgaatcgatatctgtatctttgcaacggcggtagaactcatctattccatgatgaaaaaccaggttggcatacattaataaaccaataggaatatcaggatattttgcccgaatttttgttaatagttcaaaacagagcgtgggagttacatttgaggagaaagcgcgtagattagcattctgaattgtcgggccgtcagccagcggatcggaaaaaggaatacttaactcaagagcatcagcaccaccggtaatcagtgcatcaataattttcaatgataattctggggttggatcaccgagtgtgacaaaggggacaaaagcaccttgtttacgactttccagttgcttaaatagctgctcgtaacgttccattagatttcccccctagattttaaaatatcgtggacagtaaatatgtctttatcaccgcgaccagataggttaacgatcagtaattgctctttatcaggagcttgatggatcattttcaaagcataagccagcgcatgagaggattcgagggctggaataataccttcctcacgggaaagggttttgaatgcttctaatgcttcatcatcggtgatggaaacatagtcagcccgtccaatgctgttcagataggcatgttgagggccaacggaagggaaatccagaccggcggaaatagaataagattcttcaatctggccttcatctgtctgcatcatcggcgatttcataccaaaatagatacccaatttaccatgtttcaatggagcgccatgtttaccggtttcgataccgagcccggcaggttcaataccaatcaggcggaccgatgtttcaggaataaattcggcaaacatgccaatggcattggagcccccgccaacacaggccaacacggcatcgggcaggcgtccctctcttgccagaatctgggatttggcttcttcgccgatcatacgctggaactctcggaccatcgttggataagggtgtggtccggcggcagtccctaataaatagtgggctttatcatagctaccagaccaatcacgtaacgcttcattgcaggcatcttttaaggtggcagaaccgctgtgaaccggaataacttcggctcccatcaggcgcatgcggaaaacattaggggattggcgctccacatctttagcacccatataaatgcggcatttcatatttaaaagtgcgcaggtaagggcggtggctacaccatgttgaccggcaccggtttctgcaataatttcgtttttgcccatgcgtttcgctaatagagcctgaccaagtacctgattggttttatgagcaccgccgtgtaatagatcttctcgtttcagataaaggcgcgttttggtgccttttgtcagattacggcataacgttaatgccgttggcctgcctgcataatttttcagtaaatcttgaaattcttgctggaattcgggatcttgctgagcggcaataaatgcggcttctaattgttcaagggcgggaataaggatctgcggtacaaattgcccaccgaaatcaccaaaataggggttaagcttactcattattctatttttccattgtaattaattgaaatatagtaattaatcagaaaacagtaattaatcgaaaaattgctgtttattggtaacagcgtaacagttgaaacaccttatttagtttatgactgcttttaatgccaggtgcgttttcgacgccagagttaaaatcaagtccgcaacagccatattttgcggcttgttggcaattttcttcatttaatccaccggcgagcatgatgttggcgagtgattgtttttcaagtaattgccaatcgaaactttggccggttccacctttgccgttatcaagtaaataacggtcaacatttccggctttggtgtgaaattcatctttcgacatatcaattgctttccagatttgacaattttcaggcaatatttttcgcaattcctcaatataaacttcgccttcggcaccatgtaattgcaccgcagccagagaaaggatacgggcggtatgactgatgaatgcagatgattgattttgaaataccccgacatatttgagatttgctgcattgataatttgttgggcctgttggatattaattttacgcggtgaatgttcagcaaatatcaaaccaccataaacagcacctgcctgtaatgccactttcgcatcttgtggccgagttaatccacagactttattttcacccagaatcagttgacgtaatgctaaatccagattgggttgagccatcaaagcactgccaatgagaaagccattagcataatggctaagctcacgaatttgttgatgctggtggatacccgattcgctaataacaatagtttcttccggtaactgtggcgcaagttgtttggtacggtttaaatcgatagaaagatctctcagatcacggttattgatacctattactttagcttttagtgcaaccgctctggctcgctcttcttctgagctgatttcagtcaggacgcccatattcaggctatgcgcaagttcagacagcgtaatatattgctgatcatcaagaacagaaagcatcagcaaaatcgcatcggcttgataatagcgggcaagataaacctgataaggatcgataataaaatctttgcacaataccggctggtgaacggcatcactgactaaacgaagaaattcatagttgccttgaaaatatttttcatcggttaatacagagatggcggttgcatagggctgataaattttcgctatttgaattggatcaaaatcttggcgaataacgcctttagaaggagatgcctttttacattccagaataaaaacggtctgttcactgtttagtgcctgataaaaatgacggttgctggcaacaacagcattaataaaactttccaatggttgttgctgtttacgatgaataagatattcggctttatcattaacaattttctgtaaaatggtagcttgcatgattaactccttgttgcaagtgctataactcgttcataagctcggccactgtgaatggtttcgagagcttgttgggtgttatgacgtaaatcttcctgtccatgaattttcattaacagagcaacgttagccgcaacggcatcagcatgggctttcttaccccgtccttgtaacaataaactgagcatttcatgattatccacgggtgaacctccttttaatgctgacattggatgacgttgtaaaccaaaatcttcagcatttaattgataatggataatttctccatcgttaatttctgccactttcgttggtgcatgcagggcgacttcatccatgcctccgctgtgtacaaccgctgcccgttgatagccaagaaccagtaaggtgcgggcaatcggttcaacgagctccgggctgtagacgccaattaatgctaatggcggacgtgccgggttaatcaaaggacctaatatattaaatatagtccgggttttcagttgttgacgtaccggcatcgcatgacagaatcccagatgataatgtggcgcaaacaggaaacagatgccgatttcatccagtgcactacgggcacattccgcgctgatgtcaagggcgataccaaacgctgccagcaaatcagaagaacctgattggctggaaacgctgcggttaccatgtttggcaattttaatctggcaagccgaggcgacaaaggcactggcggttgaaatattgatactgttcgcaccatcaccgcccgttccaacgatatcgcagaaagtgtaatctggccgtgggaatggcagtgcatttgccaataatgcttgggctgcaccggcaatctcctgtggttgttcacctcgtaatttcatgctgataagtacagcagcgagttgtggttcacttaattctccttgaataatggcggcaaatagttgctggctttcttgttgtgtcagtgtttgcgcattaaacaatttgttgaaaatagcttgcattttcatctcccttttaatttagtgcccaaaccagagtttgttcaagcaatttagcgccatgagttgtgagaatcgattctgggtgaaattgaaatccacaaactttatgtttatcgtggcgaactgccatcacggtgtcgccacaacgggcagaaatagtcagttcagatggaattcggctacctgtgagagagtgataacgggcaacgggtagcgggttttccagattagcgaacatagcttgattatcgtgttttgccagagaagctttgccgtgtaggatttcatcagcagcagaaatttttccaccataagcttcaataatggcttgatgcccaagacagatgccgatcactgggattttgccgataatttgttggagtaattgaggcatacaacctgagtcagatggtttacccggtcccggtgaaagcatcaatagcggagaggagagcattcttaattgctgcataatcatttcagttgccacagtattgcgatagataacaacctgatgaccatgattacgtaattgatcgacgaggttataggtgaatgaatccacattgtcgagcagaagaatatttgccattagaaagtctcctctgcctgatgagcctcaataattgcccgaatgacggctcttgctttgttacgagtctcttcggattcggctaaaggttcggaatccagtacgatacctgcgccaacctgaatcgtcgccatgccatcttccacgtaagcagagcgaataacgatacaattatccatatcccctttgccggtgaaataaccgacagccccaccgtaactaccacggcgttcactttcatagtgagcgataagttgcattgcgcgtactttcggtgcgccggtaagggtacccatattcatacaagcttgataggcatgaaaggtgtctaaatcatggcgtaatgtccccacgacgcgggagaccagatgcataacaaaagagtagcgatcaacttttgtcagatccgcgacatagcgactgcccggttcacaaatgcgggccaggtcattacgcgccaaatcaactaacattaagtgctcagctagctccttatgatctgttcgcatttccagttcggtccggctatcaagatccgcatccagctcgccggccgcattgcgcccacgggggcgggtgccggcgattgggtagatttcaatttggcgattggatgcatcatatttaagcgcgctttcaggagacgcgccaaacagacagaaatctttgtcctgcatgaaaaacatgtagggacttggattgtggtacttaagtttttgataagcatgaagtggtgccgggcagggtaaaaagaagcgtcttgatggcactacttgaaaaatatccccttggcggatgtattgttgcaactgtgccaccatttctgcatagctcttgtcatcccgattgtatgaaactttcatggttggcagagagatttgttgtactggctcaatgggctcggtaatgagtgccactaatgttttcaatcgttgtttaaggcgttgctcttctgcttgagaatcactgaaaagagagatttgcaagcgtgcatttttattctggtggttgatcaccaataacgtttctgcgagataaaaacagaaatctgggcagcgttgaacggtttttactgccggtaacggctcaaatccggccaccagatcgtaggaaaaaaggccgccaacgaatatcgcttctgcgcttgacgaattatatggtgacggctcttccgccagagagagcagggcacgcagtgcatcaaatacggataccgctttcagacgattatcttcatctatattgtgattgatgggtgggaaaatcacttgaagagcattgtgtgttatttcagattgaacgtcgctggaaaatttgttggccaaaatgggtaataaatttcgcccattttctgttaacgcgtcaaaagtaacctgattgccgttggcactgatgcgcaaggcactatcgataattagcagactttttaagttttttttgctgttaatttccgcagattctagcaataaagttgctggtcgctcaccgcagagctggttgaatagctgcgtaggatcgggttggtaagcagcttcctgctcgattactgtgatttttggttgtttatccgtcattttgtcgtcctgttaataagctatgcatataaaaaaacccgctgattaggcgggttttggtaatttggcactgttgatttatgtgcgtgaccataccgcccttactgggaagttatgccaccaacggatagacgtcatcaatacagccattttcagtgcctcttcattatcactcttgtactagtaaactggaacgaaattggtgtgtcaagtattttttggtacgtttattaaaacgttacaagtagtgcatttcccaccgaatctattcaagagataaccctattttaataactagataaaattgagggttaatttggcgacattttattacggtgtaacataaaatagtcagtagttagagataagataatatagggtacttaattttaataaaattattattttattgtcacaaataactcatattattattttatggtatagctatgatatatatttaataatattaagtatgtaaatcatgtttcatgaaaaaaaagaatttagcgatagtaaaaattggttaaagagcaggattggctggattttgtttgagtcaataggcaaacggggaaaatagataatcaaattttatatcttaatatgaaaaaaagaggtttaaccgatattactgtgagaagtagtattcataactctaacatatcgtgttatttaaaatttagatctttataagttaaaactatgtaattatttgtatttaatacgttataggtatgtcagatgaacgattttttaatctgaatacttatagatctctacttaattctggcatcggtcgccatgatttaactctctgatgtttaaaataattgtactattagtggagtaagatatgagtgaaaatgaacccaaagcagatagccaattggtgtatgaaactgatccatataaggttaagaattcggaagaaggcgcggcgcaaaaaacttatcggttaaatggttttgatcctaagacaaccgatggggcattatcctataccccaacaagactcgctaaaacggtttttaatatttatgagcagaaggatgattttggcgttttctgttatttaactgattggtcaatctatgatgcgcgttttattgacacagcaagcgaagatgattttaaaaagaatggtggcagaagctctgacttaatgcgctttaagggtgataaagacaagggaaaaccgtttcagcgaattatctttagctttgcaggtattattggtgatcccggagagaagaaagcaactatcattgctgctgcgggtaaaaatggatggaaaatgggggaggacgaacaagatattcttgagaatcacgaaggcaaacctattccaattgatccctgggctgatgttggcgcttatcttaattgtggctttactgggtggaagggggatgtttgggatttatatgaacaagctaaagcacagggagtattaggcggtttacgtttactcaaggaggaaaatccagatctggaaatttctgtcagtgttggcggttggtcaatgagcggtgctttttataaagtttgtcgtgatgagaaactgcgccaacggtttgttgagggggttaaagatttatacaccaaattcccgatgtttactcacattgatcttgattgggaatatcctggttctgcgggggaaagtaatcaatttgatgaagatgattataagtattttgctgagcttattaaggatttaaaaaactcaaatatcagtaatttgaaaggaattagtattgcagcttctgctgatgtagaaaaaattaaagccgcacatattccagaattgatcgctgccggtgtcaatgaaatcaacttaatgacttatgatttctttacattgggcgatgggaaactttctcatcatactaatctttatcgtaataaggatgaccagtattctaaatattcagtcgatgatgcagttaactatcttatctctttaggtattaataagaaatttatctatattggttattcgggttatacgcgtaatgccagaactgcggagttagagagtaaggataatgaacagctagttggtaaatatactgatggaacatccacggtagggagttttgaatacagcgtaattgaatggacagatattatctataactatgttgattatgaaaatcaaataggtcgtaatggctttgcggttattcatgatccggttgctaaagctgattatctttacaataaagatctcaaagtatttatgtcgttagatacgccccgctcagtaagagataaaggccgctatgttaaagaaaaagggcttggtggtttatttatttggaccggcgatcaggataatggcttattaacgaatgcggctcatgaagggttaggccgtaaagcagttaaaaaagtcgtagaaatggagccattttatttcgaaggtgaacttccttcttacgataaaccgaaagagaaacagtgtgaagcatgtaaattgaattgaatttatgctttaaaaaatctcactacttaaagtggttatagtctctataactattctgttcaggtgtttccgattaattaggttgggaataatataatggataaatataaaagcatttctcgtgaaaaacaggatataacacaagtatcaccattattagctgcggtggcagaagtcaaatcatcaaaattgccatcaggttataggttattaaacgcagtagagaaagaagataattccactatcacgctggttaatacactccagcgtctgggttatcgctcaatttttgatattgcagaagtatcaaagcagagatttattaaacgccataatgaatctttatcaggtcatgcagaggtaatttttgataaagcagtgagtgcggctaatcaattggtacaaagttatcggcaaagacaattgagggattacgatggcgcattattaacaaaagcaagccatcaggcaagatattcttcttatagtaataatgatgtaaatgataaagaaaaattacctgattatagtagtttatttcctgagccttgggatagcttttgtcagccaaacgctattgagtccctcgacagtccggtaaattacctgcttgatctttataagtttgtacaacaaatagagttagatggctctaataatgccgtgggattggaacaaaggcgtgctgatattcctgacttattactgaatagtgataatctttacaaagagattacggcaatatctattgtgaatgatgttttgtcgaagagtgccagggaatatattgatcaaacaggtcaggcggaaaaaccggttaatcaggttttgggagagacgcgttttccctttacattaccctatagtttaccctctcaacagatcaataaaggtttggccgaacaagagactgaattaggtacaattattcagcaagtgaatcaacaatttccttggcatatcttaacggaaaaacgagatcaggctctgcttgcttatactcaattaagtaaggagcaaatgactttactgacagagaaaagcccatttgcacaaaactttttatcacgcgaacaacttattaatagctatttcagcacaagtacaacagaagtattgcctgaacatgatgttgtaaaacatgcttatattattcatgctgatgaaaatgtcactggcccgacattattgagtgataatgttgataaagcctatgatgaaattgttgttacctgtgaaaataaagctaaagagacgatcaaagttaaacttcgtggtgaaaatgttctgacctacaatcgcataaaagcgaggatggagccttttgataactcatcaccatttagtcgacagttaaaattgacttatgtagaaagtgataatagtgatatcggtaatttagataatggtcctttctttggtgaaatgacagtttatgctgcgataccaggagagaacacaaataattcttcggtaaatattgaaggcattaatttcctgaccatgacttaccgttttgctattgcgaaacaagggacggcacaatcagaattattgccagaagctgaacaatttttccaagataactatggtgtttctgcggatgaaagtgtgaaattaaaagagattttatcttttggtcaacaaacaggctcgaaagtaacagatctcgaacacttgtttaatagtggtgatttccggcctttagtttcgccaaatgtggtattttctaatcctatcttcgatagtgggcaaacatcagaacactttcctgcaccttatcactatggtggaatttatatcaatgcggggcaattagacgcattaagcattgtgagaaccgactctggacgggaaatagatgcagtttccgattttcgttatgatcgaatgaaccgctttattcgtttacagcgttggttagcgttaccttatcatcagcttgatttattggtaatttcagcaataaaagcggagtccaataataccgatttggctatctctaataatacattaagatcattaggcttattccgccatttatcgacacaatataaagtattaccggaggcgtttgccggatggatatatcgaattacgccatttgctatcagcaataatattccgttttttgatcaactgtttaatcagtctaaactttttgatcagcctttaattctggatgggaaagaatttaattatacagaaaatcaaggtgatggagcaaaaacagttaaacaattgtgtgctgggttagccatttctttatccacatttcaagtgattgcgcctattgttgagaacgcattgaagctctcttctggcaaattggtgcgtaatcttgatgtcgtatccagactttatcgcttggtgactattccacgattatttggtttttctgcggaagatggattaattctggcggatattttaaccgataaaagcgaatatctggcaaatataccggctttaggagagaaagatgacatcctcagtattattgctcaaatggaagttttgacttcttggttgactaaaacaaaactgacaccgatcaaactttccttattattaggtaaaactcagcttccggtcgtgccaacaagtggtatgttaaccttttataagggaatttctgagggtttgactgataatgtatgcttacaagaatctgattttaatcggcaagaaataaataatatagattggtggactgttctgtcaggtgaaaatggcatttttgataaggaaaatggattaatcaaagatattccattgatatggggaaaaacagatgaggaatctctgaggaaagaaatagaagatattgtaacgaatataagcccagatgataatcaaattaatattgtcgtacagattatattgcaagctaaaaccgcacaagagagtctattatctagcgctattgcgggtgaatatggggtatcaagagatattgtgccactacaattgcgttggttaggaagtagtgtttattcagtattgaaaatggtgttagataatacaccagaaaaagttgaagatattaaaacagagtttctggacttgacctatagtctgttagtttatacccaattaattaatgcgttgagcataggtaataatctattgttattacgcctgacaaatccgaaatggcttgggctaaatatagatgaaacaacagaaatagcattgtcattagatgaaattttcctgttgaatcgctatcaagatttactggaaaatgcgaaacaaaatgaagataaggttcaggaatactttacttttgctaacagtgaaattttaccaaagacagaagaggatgataataattataaatgtgcgcaattactggctgaaattttagattggagtcctgatgaaatttatcttgcttgcgataaaggaggattagaaagaaaacgtgcgataaccttatcccaaatagattggatacgacggctacaacaattttctgtgaaaacccatttatctgttgagcctttattaggtgctgctgcacttgatgttaattcagattttgaagctttccaaagcatcggtgaagcggtaatggctgcattaaaagcgcaaggagatgatgagaatgtctaatttaattgaagcaaaattacaggaaaatttgcgtgatgcattagttgactattatcttggtcagattgtcccgcatgatatcgattttcaatctcagcgtgaaggaattaaaaacgttgatgacttgtatgattttctattgttagacactcaggtttcttccaaagtaaaaacagcccgtgtcgcacatgttacccaatcggtacaacaatatattaaccgtattgttttgaatttagagtcaggtttatcgatgactcaggaagaggcagataattggcaggagtttgctaatcgttatggttattggtcggcaaatcaacaactggctatttacccggaagtctatgttgatcccacattacgtttaaccaaaacggaattctttttccaacttgaaagcgcacttaatcaaggtaagctcacggatgatgttgctcagaaagcaatattgggatacctgaataattttgaagaggtcagtaatttagagattattgctggctacgaagatggtattgatattgccgatgataagatctatttcattgctaaaacacgaactcaaccttaccgttatttttggcgaacactagatgccaaacagcgtaataatcagactgacgaactcaatcctaccgcttggggtgagtggaagctgattaatgttcctttagaaaatgcctataatggtattattcgcccaattattctaaatagtcgattgtatattagttggtttgaagtttctgaagaaaaacaagataaagataatagtattaaatatcgcaccaaacttaatttggctcatttagcgtttgatgggacctggagtaccgggacaacggttcgtgaggatttactcgaccactcaatgaaagagttgattgcggttctcgatcgtaccggagacgctgaacgtttagcgttggtggcatttgtacgcttgaaaggttcggatcagggaacaccgtacgattatgatgaagtcttcacttatgtttgtgacaacctattaatggaagcaacggatttgcccaaatccacgtcaacattatctgaccttgatgcatatggtgctgctttagtctggttctatttccgggaacccttaaatggtggaccggaagaatataagcaattggtgctctatcccgttaataataatatgaaatggccgattgccgaaccaccaatatttgaaggacaattgggtacagtaaatgatttcaagctagatgcaacttatgttgacgggacattgaatatgtatcttacgtccacttcaacgtatgtatatgattttagcagaagcaaaaatatcctctattgtatttggctagaagatagcaagggtgaacgctgttggcttgattataagatactgactccagaagattatgatccaaagctgagtgtcacattgaaccgttgtgatagaaatgatgtaacggttgttacgggttttagtttgccatcagaaactggagatgttgcgggtaaaattaaaactaagctcagtgtaggtaaattgcttcgtggcaagatacaaattaaacagactaaacaaactcagtatttgcaatttccaaaagaagagcagccagaggagcaacgagaaagttggtattctgacaaagcgattcgtttaaataccctgtttgcaaaagagttaattagtaaggcgagtcaaaaactggacaaagttctcagttgggaaactcaaaatattcatgaagagccgattactggcaatgtttcaaaacctattgaccttaaaggggcaaatggtatttatttctgggaattattcttccatatgccatttatggtggcctggcggtttaatgtcgaacagcgttatgaggaagctagccgctggattaagtttatttttaatccttttgaaagtaatgacgaaccggcgctggaacaagataaaccacgttattggaatagtcgcccgatcattgacgagcccaaaagattacgcagtctgatagaaccgactgatcctgatgcaatttctgccagtgaacctattcattatcgtaaggctatttttaacttctacgttaagaatgttattgatcaaggtgatatggaatatcgcaagttacagcctactgccagaacgctggcacgtctgagctatgcaacggcaagttcattattaggtgcgcgtcctgatctccaattagccagttcctggcagccaataacccttgaggatgcatcatataagaaaaatagcgcagtacgtgcattggagatgatcagttatcctttgccttatgccccggtggttcatgataaaacaattcgtgcgctggataatgatctctttatgaaaccgattaatgaagagttaacggccctgtgggataaaatagaaaaccggatttacaatttacggcataatttaacgctggatggtaaagaaatttccatggatctttatgattcaaagatttctcctcgtggattaatgaatcagcgttatcagaaggttgttgctgccagaaatgctagcagaatgaatttcagagtaccaaattatcgttttgaaccgatgttggcgcgggctaaatcgggtgttgatacgttgatacaatttggtagtacgttgttaagcctgttagaacggaaagataatttgagttttgaatcattccagatggttcagaataatgatctctaccgttttgcggttgacctccagcaacaagacatcaatattaatcaggccagtcttgatgcattgcaagtgagcaaacaatctgctcaggagcggtacgaacattataaaagtctttatgatgaaaatatttcgtcaacggagcagcaggttattgaattacaggctcaggcatcttctgctctattagcttcacaagtatcaagaacagcggcagcagcactggatttagttcccaatatttatggattggccgttggggggtcacgttggggtgccgctttaaatgctgttgctgaaatagcaactttgaaatatcagtctgataatactaaagctgaaagcctcagtgtttctgaatcttatcgccgtcgccggcaggagtgggaactgcaatataaacaagctgaatgggaaacaaagtctattgatcaacaaattaatattcagcagttgcaggtcagtgccgcgcgtaaacgtttggtgcaagttgaagcgcaacaacaacaatctcaggcactgttggcttatttctccagccgttttaccaatgaaagtttatatacttggatgattagtcagatctcaggcctctatttacaggtttatgatgctgtttcatcattgtgtttatctgcacaggcctctttacagtatgagcttgggctaggcgagcagaattttattgatggtgcgagttggaatgatctctatcaagggctgttggttggtgaaaatctgaaattggcgttgcaacgtatggaacgcacttatgttgagcaaaattcacgtaaattggaaattatcaaaacgatttcgcttaaatctttattgggtgaggagtgggagacaaaacttcaaaccttgaaatcgcataaccaaattacgtttaatttggatgaaaccaaacattttgttccagattatacgggcttatttaatcggcggattaaatcagtttcagtgacgctaccgatgttaattgggccttatgaagatatttgtgccaaattaagtttgtcgggtgtgagtagctatacgacaaaagcggatctcaaaaccgttgaaaagatgttaaaagagggaactcgtgcggaaacaccttatacggtgcgcagcatccagcctaatcaacaaatcgctttatctacggggattaatgacagtggaatgttcacacttaatttcgatgatgaacgtttcttaccctttgagggggtaggggtaggatcgagttggaatttccaatttaccaatacctcacaggatttagaaagcttaaccgatgttattcttcaaattcgatataccgcacaagaaggatctgcatcatttggctcggctgttaaggcattattgagtaaggaaaacccagatttgtgataacgagaattaagcattaaatgaatcagtcacctgaatttaaaatgcttactcattatctttaacattcaaattagcctcttctaatgatgtggaggctaaatataaatcgcattggagtttataaatggtaaataaatatacttatacctcatcgaaatccatgtccgacatcagtgatattgttggtgaaccattaactgcatggaataatcaggcaggcggccaagtttataatgttatttttaatagtggtgtttataccaatacctattgggttgagcgctggcatattcccgatcctacggctaaagagggaacaccgcataatgcttggaaatatattcgtccagcgacggaagatgagataaaacagcacggaaatcctaccgatgggcgtattgatccaaccgaagatattccttcaccagttttacaaccggatgctattacagaacaaacctatcaacggccggatgttaattttaaacctgatggttcagcgggtaatctttcttatactgcgtcgcgtgtttgtcgcccgatgtataatgaatatgaaagcgataaatccagaccaaaactttctgcttatattactgattggtgccaatatgatgcgcgcttagatggtaaaaatgaagacgctgatcagcggggaagaggatttgatttaagcactatcaatgtggctgcctatgataaattaatattcagctttttgggtatttacggtgatactggtgtaaaaggggataagatcaaagaagttgccgatggttggaatagccagagtgaaataaaaattactgaaggccatattgttcctcttgatccttatggcgatttagggactgcccgtaatgtgggattacctaaggaaagtgctaacactaatattaatgcaggaacatttctgcctttttatcaacaaaagaaagcgtccggtttattaggtggattacgcgaattacaaaaaacggcgcgtttagcgggtcataaacttgaactggcttttagtattggtggctggagtatgtccggttatttttccgtgatggcggctgatgaaacaaaacgtggcgtttttgttgacagtattgttgatttttttgcgcgctttcctatgttcagttgtgtcgatattgactgggaatatcccggaagcccaggtgaggatggcaatgtttacgatccgaaagatggagaacactacgctctgttaattaaagaattacgtgagtctttggatagtcgatttggtcgagaggatagaaaagagatctccattgcttgtagtggtgtaaaaacgaaattagcaacatccaatattgccgaattagtcaaaaatggtctggataatatttacttaatgagttacgactattttggtactggttgggcaccttatatcggccatcatactaatctctattcaccaaaagatcctgatccatcaggcgcatctgatttatctgcggaagttgctatcaattatttgcatcaggaacttggcatacctttggagaaaattcatttaggctatgctaactatggtcgtgcaggcaaaggggcaaatcttgaaacgcgtgaatataataaaacgggtgaggcgttaggaacaatggaaaaaggttcacctgaattctttgatattgttaataattatctggatagcgaacatactctcgctaccgggaaaaatggctttgtgttaatgacagataccaatgctgatgccgatttcttgtttagtgaaacagaaggacattttatctcattagatacgccacgcacggtgaaacagaaagcggaatatgttgctacgaataaactgggcggtatattttcttggtcaggcgatcaggattgtggcttgttggcaaatgcggccagagaagggatgggctatattgccaaatctaatgatgaaactatcgacatggggccactctataatccgggtaagccctattatttgaaatctatcggttaggtgaagaaaaacgccggttaattcttctttgccaataaaaagggatatcgcttttcttatctgtccgtttttccattcttaaaataatcatgtttagcccgatattccagggctgaacatgattatttctgtaaaacgcgaccatttaccgttaagctatcccatcaagcgttttaagctattcgggcagagaaagagataatgacaaattcagccactgagttagtaacaatttacgatctgcatagccatacgactgcatcggatggtttactttcaccagcagaattggtcgaacgagcggtggcaatgggcgttaatgtattggccgtgactgatcatgatacaacggatgctattttgccagcccatgaatatatcaaccaacatgatttgccattaaagctcatatcaggggttgagatatccaccttgtggcaaaatatggagattcatattgttggtctgaacattgatattcagtcaaatgcaataattgaattacttaataaacaatctgaactcaggaaagaacgaggaattgaaataggtcgcaagctggcaaaggtgggtattcccgatgcttgggcaggcgcgagccgattagcgaatggtggacaagtaacacgaggccattttgcccgttatttaattgaaataggcagagagccaacagtggcgaaaatatttaaaaagtatctggcaaagggaaaaatcggatacgttccaccgcaatggtgtacaattgaacaagctattgatgccattcatcaatcaggtggtcaagcagtcattgcgcatccgggacgatatgatttatcgaccaaatggttgaagcgtctgattgtctggtttaaacaacatggtggtgatgcaatggaagttgcacagtgccagcaggcacctaacgagcggaaatatctcggtcaattgtcacgggaatatgatttgatggcttcgttaggttctgattttcaccagccttgttcatggatagaattagggcgtaaattgtggttacccggtgatgtggtaccaatatggcgtaactggtcactgtaggggctgcataaaattaagaggtaatttatgagccagtttttttatattcatccagataatccgcagccccgcttaatagggcaaagtgtggatatgttgaaaaaaggtggggtggttatttaccccactgattccggttatgcgattggttgccatctggaagataaagattcgatgactcggatatgccgtatccgccagttagatagtcatcataatttcaccttaatgtgtcgggatttgtcagaaatatcgacctatgcttatgttgataattcagcttttcggctgattaaaaataatacgccgggcaattacacgtttattttgcgtgcgacgaaagaagtccctcgccgtttgatgaatgataagcggaaaactatcgggttacgtgttccatccaatccaattgccttggcgcttcttgaacaagtgggtgagccattgatgtccacgagcctgattttgccaggcaatgattttgctgaatctgatcctgaagaaattaaagataatttgggaaaacaggttgatctgattattcatgggggttatttagggcaacagcctaccaccgtaattgatttaactgaggatacgccggttgtaatacgggaaggggctggcaatatcacgccattcttataagttacgcagtaattattttcagaatctatataaagcctgtgtattatacgcaggctttatatttttgattttttaattgaatcgaaatggttattgttatttcgaattattaatactaactcaataaaataagaccatcatctatttaataattaagttgattttaatagtgtgataaggaaatatttacctcacctaaggtaagtttattcgctgattatttaatcatattattaggtataaaacctttgggctggctatttaatataaattacagcgtaaggttatccattcattataaaatcaagggatattgaaaatgtcagttgttaatttctccgataaaccagttgatggcgctaatgttcatacatggccgaaatcaccagatagggatttaatcgcatgtggacgtgacgcatatgctgaaaaaacagtgcaagaagcattgaacggagatcctgataaagcggtaaaattaagtgaattaaatgatattctggctgcctgtgaaccttttaactttaaaggcgtcactttatatgcaaaagatcctgtcttggccttaattaaagcgttatcagagaagagtgcctatttagtcgatgattcatatcctcctaagcaatggcagagtgggggagttgataagcataaccgtattaaagattttattgaatctccgggtatgtttattaaagggatagagatgatcgatatgggtcagctttatcttggtaattgcggctttgttagcaccattggggcaattgcatcccatcctgaagggcataatttgttattttctgctatctatccaccggtttataacccaacgggcatttattcgatcagaatcatcaatcaatcgacggttggttatttattgattgacgatgatctgccacgagtgagtttttctgctatggaagataaaaatgagttttggtattacctgattgaaaaagcatttgcgaaattgcatggaagctatgagaatttaggcggcggtaatgaaatctattttggtatagaatcgacagcaaataccagtattaatcagggtaatcaggatcgtatttgggatgagaaatttatcgatatcttcaaaataaaacatcatgtgacttatcaaggaaccggttcatcaacggatttagtatcaggtcatgcttatttaatattagatgctcagcaatggaatgatattaagttagtacgactgcataatccgtggaatgttgttaaatataaaggtccatattcgcctgatgctgctgaatgggaaaatattccagcagacgtgcagaatgatatattccagaataatcgatttgaggggaagtcattctggatgccatatgatctctatgttaaaaatttgccaaaaattagtgatatgtatctcagtaaaattattcctgattcactgaaaagtattgcaaatccctctccaattcaagagtaataggatataggatttgccaggattgatttgtaggtcattaatttaatattagtgcctgatatgaatggcaagctaaataaaagcttgatgaaacgtggcctgaaattttataattcatggccacttttatattattaaaaattatatttattaattaattttactattgaaagaatgtgtggataagtcaattgtagaaaattaactatttatgggtattggtagtttattatatcgggaggtggtcttttaaataattataattgctcatatatttggccaatcgtgttttagctcggtttatgtactaatatttcagtgtttttccaatgaattttagtgttgagtaataaacaaatatgctgaattgtaatataaagaatttccattagcctgggttttgattaaagttcctttcgagggtttttatgagaactgtccaaatacagttgatcgcctttcttgattatatcacccagtttactggctgatatgatgggctataaattccctgtgttagcgtattgctaacacagggagagtggtcattttattaacaagagatcacccaaatccatttgcatactcttaaattttacaaatattctttaggtatatttgatagttgctcctctagcgaccaattttttggcttggatttttcagagttccattttgcgcctttatccaaccatttggatctataattctttaatgctgctaaaatagcgtcttcatagccaaactctaccccacaacaatcacagatatcaaatgttggtgagttaccatcttcaccccacggaggatctaactgttctgcaccacacacacggcatacatataatctattatttttgtgcattgaagtaatccaaatttgtttcatatccatgatctactggatttggtttaaacattgttttcgggacattatccacattttttactgcaaaaatatttgtttttggattgtaatacaaggtatcaccattagctcgggttttgactaaagttccttttggaggatttttaataaaattatgggtggcttcgacatattgttttgaattctgatattcagggaattcacttttatgtttatcccagtggccgtaagcatttgctacaggctcttttttcttcgtttctgtccatatctgagtttctttcgttttgcttgagcctattgtgttgccaacatgacgactcttcccaacaatcgaagcaaccgaagctttaccgccgatagcaccaccaataccggcagattctaccgcctctttggctatcagtgcacctttttcccaagctggcaacgagttatacaacagccctaaatcgttctggttttctgtcgtcacaaactggctgagacgatgagtatcttcagccgataagccaaacatccatctcagaccactgatggcatccgctgtttttatcccaccttccatttcagcctgataggtcagtgtgcataacccaccgttcccggcacagtgagacaacatttctgcccgttgtgtagcgcccagtttgttgtatttgttccagattgcttcggtaggggttccttgcttattggcttcctggagctctctagccagattgtaggcattcatggagttcaggtggttaaagagaataacaatttccccggcattagccccactgttagcccctttggcgctgttggtcgcaatggcccctgcgacgctgccgatgattttgccacccgcctgaattttcattggatcattgaatgttttatccaatgttatcgcggccaattctgcggctaatgctccagccgccgcccctttggcatcaccgccgccaatttccgcagcaagggcagaaaccgccgcatggctaatggcttttccgggtaaatctaacacctgaccgttagccccaatcaacccggcaccttcggcgttaatctggctgccaatattggcaagtaatgcggtggtaaaattgtccttaaaactaccgccattgatggctgtaccaaggctggaactgataatggattgaccggcgatccgttgagccactttgctccagtcgccattgctcagtttaggtaatgtcgcttttgccgggtcaatttgagcgccattggcggctttatcccatcccatgacgttatcaaaacccgccagtgcgccacccatcgccattgatgtgatagttgatttaacggtatcgctgcttcccatatccttaagggttttcgataggtttcctttattattaataagcttaactgctgccgtagaagctagagatgagatacccgcagaaactgcgccgtatgtggcggtattcactgttgctgctgttgcagcactggctccggctgcggtagcagcaccactggctgcacccgcggcaccattggcagccgctacagttaccccggccccagccgtgactacagcaacggtgatagcgataacagcagaaacgacaggatttaaatgctggctcttatgatcccaattctcataagcatcctgaacttcattccagtttacatcttgacgttggcttaactgttttaaccaggctgtttcagaagtgttaccaagagcagccaataccgcctgtaaggattgtcctttctgtgttttgatatcagcactgattccatttgcggcctcaatcgttaattttccaccaatgtgaactgaaggcagcacccatgtttctgcacgatgaccactatctctgttcttaatgaaaaatcctttagactggctaatggtttgttcaaaagaactatctttaactgctttaaagtttatttttccatgtgtactggtcagtctggcatttttatttgtttcaattttgctggcttcataagtactgtcatctcggctgagtaaattaatatctccatcagcaataaattcagtcactttattggtgactgaatggtgcgtggtagttgaagtcttctttttaccataccacttacgtttagtactggaggtggtatattcagtcacatcttcttgtgcttgtgcataaagataaccccctttagcagcaatatctattacacctttagctaaaagtttagttgcttgaaataaaagaccttctccggtaagaatggttaaattcttatcgctatctagtctgacttctttatgggtaatagatgatctggagttcgtgttttcagtatctactgcggatttaaggtatgtgtacccaccagaagtgagggtcatatcacctttagaaattaaacttgaaccttctaactttatattatcattagctattaaagttaattcattccctgcattaacagaagtaatttggcttattcttccttcttttatcatagcgcctacattataataagcaacagataaatttagatctccaccagaattcatcaatatattttctgttgcattcaatgcagagttggtgacattcaaatctttccccgccgatatagagatactattagcggtaataggaactccccataatttagagtcttgagcagagttcaatataacctcttttcctgcggtgagttttacatcaccaatatctagatttataccaccattaatggatatggactcggatgagtctatactggttttacttatgtttattttaatatctctgattgcagttaaattagtatttttgttttttgtgaaataattgatgaaatttaaatttaagtttgttcctgaataaaaggttaaatctcctgaggcgtttattatattacttcgatcatcaatctccggtccaaaactaatttttgtagatttataggcggatattcctgaatttttgcttattaatgaaacattatgtccttttaataccgttgataaaacattaatggcagagggaaataatagtttatcaaaaaattcatatggtgctttataataggttgaaagtatagataaatcacctgatttagatatgattttagaatcggtaagttcgacaaagttagcatctgatgagataatgttgatatctttttcagcatttaatcgtgctgattttaatgtaaatccatttgcatttaatataagattatttttaactttgatatcatcagtttctgaatttaataaatttaatgttttttctttccagtcaggcgtattcaactcattttcattaataagttccttatttgacgtaattttaacttcgccaagaaaatcaataactaaattccttccagaagatagcattgtcttatttgtgaatgagtcaatttttgtttcattagaaggattatttcgaagaagattccaatcttgctgttttatatctgcgttatttctatctaatacatgtatttctctgtcgttttcctgcctatttctgtatttatagtatggattattaaatacaggatgtgaactatttattataaaatgtggataagtatttccattatatagattttcagtatttataaatttagtgcttgtaaaatgatttccggtcaaaaatacatcgccttttccatgtatttcactgtttatatttaataaactatcactatttatatataaatttcctccggaggaaatcaaactgctatcataattttctataaagaaccaattgctcatgtcactgagatcatcaacattactaaagtcaagaaaatcgtttttttcaggtttaatattagaaaggagataaagatctcttatattgagcatcttatgagatctggcaactaaatcgcctttattagtctttatggtagcagatctattttcaataagatgacttttatctccttgtgcatttttctgtatccacatattatcgttggcttgtagtaaggctttattaccgctattacgcacagtattgacaaatatccgcatatcccggccagcagtcacgcttcctttattatccagcgtggtattttccagaataatatcccgtcccgcctgcacgttaatattgggcgcaatatgggtttctttgccaataacattcaggtccgttttagccttaatattgcccagttcaattttgccattggcgtttaaagtaatatcacgctggtcactgattaaatttttcagattaacaccaacgccctcttcagtggcaaccagtcggattttattggcatacatgccacctaatgctttggtatcaacggctaattggggtttagcgccttcaccagcgacaggtttaactgtgccgtcttttaaactgattcggttagcgccttgtgtcagagacaggttattggcctgaatttttccatttaattccgttgcccggctgataatatcgacataatccgtcgccttgccatctaaccctttaccgccaatggtgatttggcctgttttaacttccaatgcttccaacgcaccctgtttatcaaattgcggtttacccgtggtcagtgttgcactcgaagtattaataaagccacagccatcacaagtaatgccgttggggttggcaatcattacattggctttattgccgaaaatctccaattggccttgcaggttagattgtccgctgccggtcacttcattaataatcagttccgccgcttttccatgcagattagggttagcgttaagttgccccgccagttgtgattgagccgcttgcgtggcgttattgagtacagcgccttgagtatcgacattgaacgctttataggtgttgtgggatatccccgcgtcattcggcgtggcaatattgacaaccggaacgttgctttggttttgtacctgcgtatggttattgtccggtgtgatccccgcagcaatcgccgggtgtagcggctgaattgccgtcaggtaaattaaaagataactcgtgcctctcgccaccgagttgttgcgtttactcatcgtactatcccttttgtttaatttaagtgttaaaaagtcagtgatgctaaccaataagtgacctgagcatctgcggtcaggcttcgggtataaaatgaccatttaccacagagaatattgattatttaatagttacattattgaaccattttaatgtgtaattaattgaccgtcagaatgggtagtatgaaatgtgatcggtactgggttttttaattctgataatggggaatccgtcatattaaatgtcggtaaatcgcgataaggatggagatgttgttcccttacgccagccatgatgttttcagttttagcgtgatgggaattgctggattagaatcattgtgtctgaaattagtgtagaatgctcggccacggagttagaatgtatgagctattttctagcattctatgctataaaatgcattaaaatcagtttgttatgattgaatttcactattaacgtattgattgatatataacacgacgcctgtgaaggcgacaacagaggttgctcaatgagcggtaagatacagaaatctgaaaagttacagaaaattctcgcgcgttccggccacggttcccgccgcgaaatagaaggttatattcaacaagggcgcgtcagtgttgacggtaagattgcgactttaggtgatcgccttgaagttcagcccgccacgaaaatccgtctcgatggtcggatattaaatatcaaagaatcacaaaaaacggtttgccgtgttttggcttattacaaaccagagggtgagctttgtactcgtcatgatccagaagggcggccaacggtttttgatcgcctgcctaaattgctaggttcccgctggatagctgttgggcgtctggatgtgaatacttgtggtttgttgctatttaccacggatggtgagctggctaatcgtttgatgcatccaagccgtgaagttgaacgcgaatatgctgttcgtgtctttggtgaagttgatgatgctaaattgaaacaactggctaagggcattcaactggaagagggtcccgcctcattccgcactatcgcgtttaaaggcggtgaggggatgaatcaatggtataacgtcacgctgacagaaggacgtaaccgtgaagttcgtcgtctttgggaagcggttggtgtacaggtgagccgtcttattcgtgtgcgttatggggatattggtttgccaaaaggcttaccacgcgggggatggacggaactgggtctggagcagactaactatttacgccaattagtggatttgaatgaggagacggtttccaaagtggccgttgggcgtgatcagcgccgtcttaaagctaaccaaatccgccgagcggttaaacgccatgctcaagtcgcatcgcgtccatcggcaggaaaacgtccgggcagttcacgccagaaggcggggcgaacaaccgcaccaaaaggccgttaagttttctgggtctcgtgtgttataacggggccttttttaccaatcgatccctttttgtgctttgatgccggcgtcaaaggcatgttttaccggacgcatctctgtcacggtatctgccatttccaataattcacgatgacaaccgcggccggtgataataacggattggtgctccggtcggtggttgagcgcagtaataacttcttccagaggaagatagccataactcaccatataagtcagttcatctaaaacaattaaatccaaatcgggatcagataacatctctaacgcatggtgccatacctgctggcaggctacagtatcggtttcccggctttgagtttcccaggtaaaacctgttgccatcacatggaaattcactccatgctgttccagcagatttttctcgccattctcccatttacctttgataaactggatcacaccggcacgaaatccatgacctatcgctcgggtcacggtgccaaatgccgcagtggttttgcctttaccattgccggtaaaaacgatcagaataccccgttctaactgggcggcttcaatacggaaatccactttttcttttaggcgttgttgccttttttgatgttggctgtcattgattgtcattattcggctggtcctgctttgcgtccgggttgggcatcaaaactgatgcctgttttatgcagactatcgctgcccataagataaagatacagtggcataatatctgccggtgttttcagtttagcagaattttcgttagggaatgcgcgggtgcgcatatttgtgcgtgtaccgccgggattaatacaattaacgcgtagagaagtgtgtttatattctgctgctaaaacttgcatcatgccttcagtggcaaatttagaggcagaataggctccccaaccacaacgaccttcgcggccaacgctcgaactggtaaagattaatgatccgtcaggtgacttcaataatagcggcaataaggcttgcgttaacataaaggtcgcattgacgttgacttgcataacatcatgccataattgcacgggttgctctgccattggtgcgacagctcccagtaatccggcattatgcaatacgccatccagatgcggataatattgcgctaaatcgccagcgaatgcctgacactcttcggctgtggcggtaagcagatccatagtgtaaacagttgcaggggcaccacctgcttgtttaatctctttttgcacagcttccagtttgtgtgttgttctgccaagtaagatcacttgtgcaccgtaacgggcataggtcaaagccgcttcacggccaataccctctccagcgcctgtcactaaaataatacgttgttgtaggaggtcatgttttggttggtaatgtaacatttgaaaatttcctgttattgacggcgcgatttgttaccgtcggaggccgttcaggctatcaaaacagaaagtgatatattgagtcaaatttgccaaggctgattgctcaggagataaacggagaaacattgcgggctgtgtgagtgaatgttagtggcgcagtgctgtgttggtagttatttgtctttagctaatgtataattcttttcgtcagagactgggtatttaatccaatttcacaccggagtgatgatgatttcaatacaaacagaaagagcagcccttctaatttaatcaatttgttaaattttacattagaaggggaaaacatgaattactcaaaggttgatatagatctctgggataggaaagagcatttcttgcattaccgtaatgttgtgcaatgcggatttagtctaacagcaaaaattgatattacccatttgttatcttcgttggtggaaaagcaatataaattctatccaaccatgatttatttaatatctacagttgtaaactcttactctgaattcagaatggctataaaagatgaagaattaattgtatgggatggtgtaaatcctgcatatacaatctttcataaggaaaccgaaacattctcagcaatttggactgagttcaattctgatctggcagagtttatgaaaaattattctgctgattatgaaacctacaaagatgatctttgctttttttctaaaccagaactacctgaaaaccactttcacatatcgtcagtgccgtgggtaagttttgatgggtttaacttgaacatggcgagtgttatggattattttccccccatatttaccatgggaaaattttaccagaatggaaatcaaactcagttgcctttggcaattcaggtgcatcatgctacttgtgacggcttccatgtgggacgtgttattaataacttacaagagctatgtaacgattttatttagttcaagccttataaagctaacctgaattatttatggcttcaatataaggttgtatcggaaatatgttaatagccatcagttaacactggtggttttcacgattgaagttggtcgggatcatgattgcgattggactagagagcataaaaatgtgtggggcacttgagttgtttggctgtaaaatagataattcaaccggattatgacccatgaatacttataccgttaagtggctctcctccagtcaaccctctggtttggcgacgctttaggttgccaggtgaaacttctttaactgtttggccgcataagtgccccacagattttgatggtctctgattgtgctgcgatgtgtgtgatgaggacatctcgcattatgataataagaaatccttgtcaaaacatgtcgatgagatgtacacctattatcgaaaataacagcatgatgatcccgaattacggtgaaatgtactgctatggtgaatccatttccacttcatttgttgaatcgacgatcaatgaagtgattgctaaacggatggtgaaaaagcagcagatgcaatggagtcagcaaggtgcgcattatttaatccagacccgtacagccgtactgaatgatgatttgaaaacccaatttgagcattggtacccgggcataaaattaggtgacgaaacggagcattcttggacagaaaagattgctgcataaatgccccaaggtaatgagatggttcccctcactctaacggcagtatattagcagagtgattatctttgataagaggctaccatcatgaacactatcgcactgattggcatcgatctcggcaaacattcttttcatgtccattgtcaggagccatcgggaaaagctctgctacgtaaaaaattcacccgaactaaattgatggaattcttagccgattgctctccggcaacggttgtgatggaagcctgtgctggcgcgcatttcatggcaaggcggatcgctgatttggggcatgaggctaagctgatttcaccgcagtttgtccgtccttttgtcaaaagtaacaagaatgattttattgacgcggaagccatctgtgaagccgcctcacgaccttcaatgcgttttgttcagcccagaacggaagcccaacaagccatgcgagcgttgcatcgtgtccgggaatcactggtccgggataaagtcaaaaccaccaatcagatgcaagctttcctgcttgagtttggcatcagtatgcccaaggggattgccgtgataaaacgactctccactgttttggccgaacatcctcttccaccttatttggcgcaaatattactacggttacaggcgcattatcactatctggttgggcaaatcaccgagattgagaccgcactgtcacaggaaatcattcaggatgataccggacaacggctgatgacgatccccggtattggtcccatcacggcgagtgtgctttcctcacaactgggtgatggaaaacaatattctcgcagccgggattttgcggcctcgacgggtttggttccccgccagtacagcaccgggggaaggacgaccttattgggtatcagtaaacggggtaataagacgctccggcaactgttggtactctgcgcccggtcattcatgcaacagattgaacaccggcagggaaaactggctgactgggttaagcagcagcttgaacgaaagcactctaatatcgtggcctgtgcattggctaataaactcgcccggatagcgtgggccattacgacacaacacacggtatttgtcgcctaaagctggcgtcattgtgaacctatttaaatgttaccccactggttttgcgaagactgattattgatgacatgaacggcctaccggcctgatgagaaacctaacataaaaaatggctctttcaagccgacaaggttttaaggttcatcaggcgcggaactcatcgaggcgcaggctccttgcctacagtgacgccggatagatttaagcaagccaaaaattcatcaaaatgagtgttgcaaaaacgaggggaaccatagattttttatgctctatatgaacgcatcccgtttgcaagacaaaaattactctggcatcgacggtaggttgcagctctatatccggccttattgcagccagagctgcgggcctcgatgtaatccgctgactggctcctcactctcctaacgagctttaagctcagagcataaatcaggtttagcaagtcacggtcttacctgtctttgtcatcattatcattgccttagcaatctttctgcattcatccttgtcattaaaagtgaaagttgatcggtgaaacacctcagtaaggtctgacactgacgtaatctttttggtattcctgctgatgggcgaccaatgcccaaacggtgcgagccagcttattggccatccccacaatcgccacacagaccggacggcgtttttttagcgccgtcacccacggcagcggggttttcgtcagtaaggtggtcactcttgcaccgtgaataaacagggttctcaggtaggtatctccccgtttactgatgcccagtaatttgacccggcctcccgttcccgtttgtttcggtaccaggcccagataggccgaaaattccctgcccgaccgaaatgcgctgggatcgcccatcgtcgcgatggcggcggtcgcaatcaggacaccgacaccgggaattttcataatccgctgacaatcggcattctgctttgcccacgccgttagttggttttccatttgttcaatttgttcgtcgatttcggtcaaacgatgatattgctcttcaagcagagcaagcaggaacggagccagtttttttctgagtcgctcagcatggccttatccagagaagccctgcctttatgcacggtttcaccaaattccagtagcaaaccatgcagcgcattgatttgtgcggttctgaatttgactaattggtggcgcattcggtgtaatgacagaatggcctgttgctcttcatttttaatcgcgagcgatttgccgggttgctgaaccgccagccaaatggcccgggcatcctgaacatcgtttttatttcccatccggaacgctttaacaaatttagcctgaagcaaacgcacgtcatgccccagcttcctcagctcccgagcccaataatgcgcaccgccacaggcttccatgccaatcagacaaggttcgcggttactgaagaacgttaaaaaatccggcctcctcagttgcttatcagtaagttcaccggtgtattcatcgacaaaatgaatttgcatcaaatgttttgcaatatcgacgccaaaaggagtaaatttcatgggtggatcctccagtcatcagggagcaatagtctcccgtttttaggcactataaggccggaaatctgtgaggatccacatctcatctctcaattccagcacaatgccaaaggctaagtggttgggatgcgttcattacattctcctaatacagataccagcaatagattaatacaaataatttaatatcatgcgaactagttttagtgggataaatacccattcaatagatacaaatcccagcaaatttattttatgtttattccttgccaaccggaaatctaggatctatggttaggataatgattaatttaatacgcaattttaccggtaccacggatgaacgaaaataacgccatgacgtatttgaatgaaacgcgggataaacggttcaacggggtcactctggcgtttgaaagcgtgacaaaacagtggcgcgatcaagttttcgcataagtaaccactgggatactgcggctggattaagattacacgtacccatcagttctatttttcgggggtaacccggcagttcaggaacgaggccgatagcttccaactaatgtaatgccatctataacaggagcacagcatggacaagcagtttaaagaggtcatcgataaattaattcaggcggaaaccgacggattaagaaacctggccttgattgacgtggagtacccgcggcagctagcacattatgtcgcgacggccttttttgacgtttatcacgataagcagaaactctcggcagaacgggccaaggtgattgagcacgtcaccgtggccgtcagagcggggcagcacgatcatgcctggcatgcccagaaagcgctcaccgcctgggcagaaacattttatcaccgccaccacgaccatcttcaccgtgacgacacgctggatacgtgggaccgcgaggctgagacgctcacccttcaactccgggagcatgcagcagatcaattggctggtctggccctcaccctgaaagagttgggggagcgatatcccggagacagtgcatggatactcgcacgctataaagccctggcgggaacgttcgtgctcatgcactacaaaattaaagaattgttacccttgctgggggccagcctccctaaccacaaattcgatcccaattttgatgccatcggatggagcctatttgatgatatccgccgtcagctgcttccctgagccgtgacgactggacgcccggcaatatatcgtaatcaacccgaattcgtcctggtgaggaaggccacggccggacatcacccggatgagaaatgccatcccacaatgaggacaccaccatgactgtaaatattttctttttcctggatcttaagggcattatagacagcgaaacaacttgccgagaacctgtcgtgccgtattaatgacaacttccaggttatgaatcctgcatcttcaagttaagcgggtataggataaacagatgagtaacgataaccacctgacacattttaataagatgcgacatgtgggtgcagaatatcgtcatggcatgacaccgataattaatattattcaacaatgaggaaataaccatgagcactattgatatattcttattattagatgttgataaaataaaaaaagagagaaaatacagtaaaaagaaaaatgaaccagcttccttagataaagatcatatacacatattgttaaggaatgatgatacttttattgaaggaaataaagaaaccctgacttttagtaaaagtaagggagaaattttaaactgggttacaatatcattggccggccctgaatcacactattcggtggtcatgtgtgggtttcaaaaacacgggcctaaagagcctatgaaaaatgtttatgctcatagatacgacaataaaagaccgacgctcaacaaaagcacttctgactctagttctgacaaagaaatctgccctgcggaatttaccccaactttaataccggaataccaatgggtctggacactacatgagacggaaaatacggattatataattatgtttgccttatatgataaagagcaacttatgtcgtactataagttttctctgttcatcacaaccaccgactaggtttacggtgtcgggtcatcgcgtgtggtgacccggaataacctaacgctcaagccgcgcgactttctctcatcatgattttcatattattaccacggcggaggtcctcaatggaattattacatcactctcaggccacgaattttaccggagccatgatgggcggagtcgatccgcgcactggcctgtttactccccagatcccgattacccagctaggtggcaacgatctttggggtcccgacctggccatcaccctgacgtacaatcccttaacttatctcaacacagggtacgggctgggcttttccgacaatttcacccgttatgatactcaaactcaagtgttaaccctggcgaccggcgagatctatcatcgagtggaaaaggcaaacgaagtcgtcgacgggcaggcatggacctttcaccatgccaaacccgcacacttcaaggttaaaaaagagaaagacgctttctgggtactgtataaaacgggtagccgggaaaagttaacccagctagatagggcaaacccagtggccgtggtcagtgaaatctatgcgccttcaggccacaaactgtgcgtaaaatggaatagttttgtcaaccacaactacaactactggcaattgatggaagtctgtgacgccatggagaccttgctaaaagcagacttagcgacaacggaaaagattgagtttactgtatggccagggtcacctgaaagctacaccgtgacgctgaacatgactaatgatctgcttcaaaccgtcatcagcgcatcagagttaacttggcacctggaatatgaaacagagggggcacataagaacattctgaccaaagttaccacaccgtccggattaatcgaaaaggtggtgtatcatgaaacgggccacacactgcccacccctaagtgcattcagtactaccctaatgcttgggggcccggcattattcggcaagatcctaagtcctctacgactgctacagttgaacatttcccttatgttacccaacatcatatcatcgcgggcagcggctcccccgatcaggtcattcgctatgtattttcaccggagaatttcctaggacagaagaataagaacatgaaagacccgatcccccttccccagcaagacaatgcctatctggctaacagtgagtataaatatacatcaacagaggtgcgagagtacaacgaaaagcgctattgcatccacagagaatacaataaatttcatctgctggtatccgaaacggaaacggtcgaagtaacaccctcaagacctcaaaagttaaaagaaacaattataaaatattatgcagatgtgggtaagtcatttgatgataataagcaaccccctcaattcctgatgccaaacacagttgagacgatatggcacaatcctgagtcatcggcatctacaacacaacgcagaaaagaaacaacccaatgggaatataacgcacagtgtaatttaatctcaatgactttaccagataataccacgacaaaaactacctattatgcgcccgatggagaggagacaacagatactcattgccctgccgagccaaacggttttgagaggtttataaaagaaatagcagtggaagccccgtcgccactaacgaaaactaaaataaccatactaagaaaggtaacatataactataaatcgtatgatacatattcccccccaaaaaacaaccaagcctcggttgtcaaatcaatggtcttgccgctatcagaaactcattatagtcgcagggattgttgcgccgaccatctcgaaaaagtaaaaattaataccgtttccttttatgaaaatactcaaaacgcatttttaaacggcagggtggaacaaagaaacagctacctgtttgaaaacggtaaccagacccgtagttatacagaagattatagctggagcaatgagaataagaatggagcatcttgtattaagtgtaaaacaacaggctcagggaaatgcggtacccccccggtatcccacgaacaatactggagcaggtccaccggtcgcctgattttccaaaaagatgctcaggacaacaatacggtatttcaatacgataccatcggccatctcatctcaagcaccattaatgcggacactgcctacgaaaagaccgtgaaatacgcttggtcctattcaaataaaagggttacggtgacgcagacggatatccatgagaaccggtatatcaccgagatggacggcctgggtcgtcccctgaagaaaagttattcccccgcaggataccagggtaaacagtttgatatggaaagataccaatacaatccgctgggacaattatgccaggccatttcctgcgatcacatgctttttgaaaataagtccgagaaaaaatgtagcagcatgacggtatcactagaatacgatgattgggggcataacagtcgcctgcggtacagtgatggcacgtcagtaaaaaatacgtttgatccgataaagatgaccagtgagcatcagcgggtgtcgaacgatgaaagccaatcttccggtatcatccgcacgacatacaaccagtttggccagataacagcgacggagcgattgacaacaagcaggattcaacaagggtgttggcactatttaagagacgaactggggcgactggtttccatcaacgcaaacgggaataccacattattagcgtacgacgcatttgatcgtgtgattaaacagacgttcgccgatggcacgacaatcagtatggcatacgaaaatggggtgtcagtcagaatgtccgccaccccgctgggaatcaatcaaacaccagtaatcctcggaacacagatccttgatggtttgggacgggtcattgatatggagagtggcggtcgtaaaataaagctagattatgagggcgcttctccggttcctgatacagtcacttatgttaagggaccaacctctggtgataaagatatcgtccttcattatgaatacgagccaaaattgaataatgccgtcaccaaaatcaccgcaggacaggacgatgtggaccaaacctttaagtatgatcccaaaacgggtttgttgacagaagccattgaagaatacaaaaataaaaacgatgaaatgattagctccaagctcatttttgactatacactgtcgggacaattagccagcgagaagctggttagttataacaaaaataatagagcgtatatgcattttaaaacatgctattccttttcttttgccaatagaccaaccgcgataaaatcaacaattaatggtccacgatatatcataaataaatactcctatgataatcagggcaggctggaaacggtacgcaataatgacatagagatcaatcttaagtacgataaactgagtcgccatgtttgtcagtcaacagagtacctatttgatactatcaataacaaaatcacgacatctctgacattagatgattttggtcgggaaacaaaacggactataagaagacataatggtttaaaaaataataaaggaataacggatattcacataagtcagacattcaatgaacaggacaaaattacaaacaaagaactattgcacggtacaaaacaaatcagtaaggaagtctatacataccacaaacggggcggactggaaacgtataccttgatggagctggtgggagaaagagagataacgcaatgctctgattataaatatgatcaccttggaaatataacacaacactccataaccacggagggcaagaccatcacttcgacctatacatacggaaatggcaatatccaagatccctgtcagttaatagacgtcagcacctgtaccggtaacaattcaagttcttccttgcggtttacatataaccaaaggggggcgttagtgtgcgaaaatgacgaaaataacacgaagatccgcacatggacttatgacagccttgggcgtatcgacactacggttgatgcccttcataaggttgaaacccgctatttatttgatgctacgaatagactcattatcaaaagatctgaaaaaaatggtacaccttatcatcatgatttgagttattgttcaaatagcttggtacacgataattatttctatggtgaaaaaagagacaatgcagcagaccgcaaatacaataaagtaggtgggatttgtttagggttttcacaaaccccctgccatcaaaccccaacctccgttgctagtcgctatacagaaactgccacggacggcaagggcagcgtcatcgcgacgtttcagggcgaagacgtacagcatattgcctattcgccttggggggtgacaaccgagcaggcaatggttacggctggtcaacagccgccgcacaacacggcgatcgaagagcctcgatttaacggtgaacagtgggataccgccagcgccagttacttgctgggcaacggctaccgggcctaccgccccgacctcatgcggtttaccgccccagatagctggagtccctttggggccgggggaatcaatgcctacgcctattgcgggggcgatccggttaatctgaatgacccaagtggacatattagcgggtggggatgggcaaatattattactggtgggattggtctcttgttggctccgttcacatatggaggatcattagaattagggctgggagttaatgcagcacgggggttaactgcattagacgcagctagtggtgtaactgcaattgcttcaggagcgttggaaaataaaaatccagaaacatcgagaagactaggatggatgtcgctaggattgggactacctagtatggtgatagggggttattctttagcacaatgggttaatgttaggttaacaaacagttttaggacaccttatcattatcccacaagtttaggagaagtaaatctgtctagaaagagttctgattgggtaaacgcacgtagaagtttaaactctggcgaaaattggcactcagaggtcggtctcaatggcagaactatttgggggtctgatacgaagatacgaggattggatataaaatatcctttagaacaaatatcaagaagaccgagtaatggtgatatagttcttttgtcgggtagccatggtgtgcaaaatggagataattggctcatcaatggatcacgtagaggtagtttacttcattttccattctttaaatcggatatgacggtgtatggaggatcgtggaagggacgaacggttcatgtaagaaatcttgcgacaatgagtgaaattgattttggtactttattaaataatggaaatagtcatattattttggggtactgttatggacgaaatgaccaagcattaagatatcatagaaatttactgtcggttacgagttatatacacaattaacttgtaacgcgattttagcagagttgcagcaaggcatgcgattcagaagccggggacttccacctaagttgagtgatgcggaaggagaccataaaaatctatggtcgccctcgtttttgcaacactcattttgatgtatggttggcttgcttaaatctatccggcgtcactataggcaaggatgcctgcgccccaatgagttccattgaacgtaaagtgtatcgcaataaccatcaggcatatcacaaatactaatccatgcaggatgctttttacaccaattttcagcatgtagagatgcttgtgaaactgaatatctttcggtagtcataatcattcctctttattattcatagttttttcaatgcaggaacattgctacgctttattaattcaccgaactctaaattctttttatttattactctaaacatatccatagctttcattatattcttctcttcagtttttttgctatagaatgacataaatctatcaataaaaattttgctgagagcataaaaaaccgtgggacatttatgcagcaatcttttctgtccaagaatgctccgtttcgtcacctaattttatgcccgggtaccaatgctcaaattgggttttcaaatcatcattcagtacggctgtacgggtctggattaaataatgcgcactttgctgactccattgcatctgctgctttttcaccatccgtttagcaatcacttcattgatcgtcgattcaacaaatgaagtggaaatgggttcaccatagcagtacatttcaccgtaattcgggatcatcatgctgttattttcgatataggtgtacatctcatcgacatgttttgacaaggatttcttattatcataatgcgagatgtcctcagagagcataaaaatgtgtggggcacttgagttgtttggctgtaaaatagataattcaaccggattatgacctatgaatacttataccgttaagtggctctcctccagtcaaccctctggtttggcgacgctttaggctgccaggtgaaacttctttaactgtttggccgcataagtgccccacagatttttatggtctccatactaggtctatacagaccattagccactcaacagaagttattgactccttcaaagataagagcacagataaatttttttgcgttcttcgtcttgtcttagtgaaaggcgggatgctaacaggcaattgtttattgtaactcttaaagatgataacaagagtgatgatttctatacccgttatccttcaagttgcctctttgttggctgcactcgctcacctcggtcacatagttacctatgctcccggggattcactcccttgccgtcgcgatgcatcttgaaatccatagggtatatattgtgccatttgctgaatgggttgtcagaagggaaagagtgaaataccttgtttctcctgaaaatcaatatccagaatttggcgataatattagcttcattatgaaacacattgagtctgttgttaaaattttcattgataattacaaaataacgactacccattaaattattatataatagggatagcgatctaactgtattgtaagggcagcataatgatggggactgtttggcccttattctttactcacagcgatagcagtttacttttccattgttcaataatttctctcttttctttcagatagtggtagcgatcaggcagttataacagtcagaatgcttggttgaaacgccgggtttttgtgattctgcaatctaattgctcatttttgaactagtcccccatttctccatcttaatggtgtagaattagctactgagaccgatatactggacgtttttatttgtacatattcgtatttattgaatacgaattaattataatatattgtttttaagtgaaaaaaatcaaatacatttatttggtaaatgtttaagaaacaaaaggtggattttgtggaatacttatctctttacgggttgtttttagccaaagtagttacgctggtgttggcgattattgctctggcaatattgggtatcggcataggaatgcggaaatcttcgctaaaaggagaattgaaactcgtcgatctcggtgagtcatatcgggataaacagcgtcaaatgcagcgggcgcgcatgacagaagcggaagggaaaatctggcagaaagagtttaataagcaacaaaagctcgaatccaagcagaagaagagtgacgctaagacaggtcataaagggttacagaaaccttgtctttatgtactggattttaaagggagtatggatgcacacgaagtcgattcattacgtgaagagattagcgcgattctggccgtggcagatgcaaaagatgaagtgttgttacgtctggaaagtccaggtggcatggtgcatggctatggattggcggcctctcagcttgcccgtttgcgtcagaaaggtattcgcttgactatcgtcgtagataaagttgctgccagtgggggctatatgatggcttgtgttgctgatcgtgtagttgctgcaccttttgccattattggttctattggcgtggtcgctcagattccgaacattcataagctattgaagaaaaatgatattgatgtggaactccatacggctggtgaatataaacgtacactgactgtgttgggagaaaatacagagcagggccggaaaaagtttcaggaagatctgaatcagactcacgaactattcaaatcgtttattcatacacatcgcccatcacttgacgtggaaagtgtggcgacgggcgaatattggtacggctcacaggcgaaagagaagggattgattgacgaaattggtgtcagcgatgatctgttgattgctcaaatagataactgtgaagttattggtgtcagttatacacgccgtaaacgcatggtagagcgtttcaccggcaatgcaatggaaagtattgataaactgttattgcgctggtggcaaagaggggagaagcctctgctttaattaaatccgctattttggatcaattatcttggcgtataccctattgatttcaagatgcttcgcggcggcaagggagcgaatccccgggagcatagataactatgtgaccggggtgagggagtgcagccaacaaagaggcaacttgaaagatgacgggtatatcctaaggcgttctatttcgacgctcagggacgcctcgatatattgcttaattgtgatgtgctaattgaacagagcaacgcttattctcatgatgttattccactgaaaaacctgctattttggccctgttaaaatattacaggtgttacataatttgctttacatccctcttcctgcttgtgatgagccgcaggcttttctacaccaatagttgatactctggctttgcgtttatctgttctgcttagctgatcttcaaacaaatccaagtcacttttgcacagcgctattggcgtttttaaacgcattatgcaaatcctcgaagaacggcaacttacaataatattcataaggaaataaagtattatggctatttcacaatacgatattcataccagtcatgctgttatctctgttgctgatacgggaggtgatgggttaccggtcctccttatacacggtaattcaagttgtaaagaagtttttcgccatcaaattaactgttttggtgacgaatatcggattttagctattgatttacccggacacggtgcttcatcaaatgcagtggatcctcgccggacctattcgatatctggctatgccctttgcatcatcgaagtactggaaaaattagccatcgataaagttgctgttttcggatggtcactggggggacatatcggtttagagctgatcccaagattcccagggattgttgggctaatgatttgtggcacgccgccggttagcccaggtgcagaaaatgtcagccttggatttaaaccaagccggtttatggcaatatcgggtaaggcttcgctgacagaagaggagattacggattataccttggcgttgtatggtgaaaacgcgctttgtgagccatttttgagagccgcagtggcgcggaccgatggtttggcccggcaatatatgtctgaagcatcggtttcaccagacgttatggaccaacggttattggttgaaacaaacccaacaccactggctatcgtcaatggtgtagaagatttattcgttaatattgattatattaacgggataacctacaaaaatctctggactggtcaggtgtataacttgctcaacttgggacatgggccattctgggaagcgccagagctgtttaaccgtttgatggcgggttttttctctgatctcaccttagaagtgtaattaatacttgtagttataccggcagatatatttttatacccgtcatctttcaagttgcctctttgttggctgcgctcgctcaccccggtcacatagttatctatgctcccggggattcactcccttgccgtcgcgatgcatcttgaaatctatgaaggtatatattgttttcatatatctgcctattcgttgctcaataaatttttgttattaattttcgagataatattgtttcggtaggataggcgtcaggtgtttgaacatattgaaaatagccgtactttttactgtgggtaaatcattttcccttagagaaaattcaccattaatactaatacatctcctttttgttctacgctacttatatacatgccatgaataaaactttcacgttggcggataatatcactagctctttttagtcattgttcacctttaatcagtgttgttctgtttctactatttctatccttaatcaaaaataatttgttgcgcatcattttttatcaggtagagtgtgaacttttcatcatgcagatggaagattttgtttacggtgatcacttcattcatttgcgtagatcatgggcggtatctaaaataccttagataattcaatatgtttcgagtttggcggaatcaactgaataaaaataagttgatatattgagaatctatcgcaatataaaaagaggttttaaataccgtgatatggcgcagtgaattccaccatctgaaaagataattaggtaaagataactatgggtaaagctcttgtaatagtggagtccccggcaaaggccaaaacaatcaacaagtatttgggaagtgactacgtggtgaaatccagcgttggtcatatccgtgatttgccgaccagtggctcagccagccaaaagagttcgagctcatctaccgataagtctaagaagaaggttaaaaaagatgagaaagctgtattagtcaaccgcatgggggttgatccataccgtggttgggaagcgaattatcagattttgccgggcaaagagaaggtcgtggcagagctgaaatcactggctgaaaaagttgatcatgtttatctcgcaacggatcttgaccgcgagggagaagccattgcatggcacttgcgggaagtgattggtggtgatggcgatcgttttagccgggttgtttttaatgaaatcactaaaaatgccatcaaacaggcatttgataatccgggtgaattaaatattcaccggataaatgctcaacaagctcgccgttttatggatcgagttgtggggtatatggtttctccgctactgtggaaaaaggttgccagagggctctctgccggccgtgtgcaatcagtggcggtacgccttgtggtagaaagagagcgtgaaattaaagcgtttgtaccggtagaatattggcaattacatgctgatttgctggcgaaaggcgaaatctcgctgcatatggaagtgacccatcagcagggtaaaccatttaagccggttaatagtgaacaaactcaagccgccgtctctttactggaaaaagcccgttacaaagtgcttgatcgtgaagatcgcccaacatccagtaaaccgagtgcgccgtttatcacatctacattgcaacaggcagccagcacgcgtttagggtttggtgttaaaaagaccatgatgatggctcagcgtttgtatgaggctggatatattacttatatgcgtactgattcaactaacttgagtcaggatgcgctggatatggttcgtgattatatcagtgataattttggcgataaatacctgccagaagcagccaatacttacagcagcaaagagaattcacaggaagcgcatgaagcgattcgtccttccagtgttgatatcgtggcagagcaactgaaagatatggatgtggatgcacagaagctgtatcagctaatctggcgtcagtttgtggcttgtcagatgacaccggcgaaatacgattccacaacattgacggtacaggcgggtgattttgagttgcgggccaaaggtcgtacattgcgttttgatggctggacaaaagtgatgcctgtgttgcgcaaaggtgatgaagaccacacgttgccggttgttgaaattggtacagaacttgatttgcaacaactgatcccaagccagcacttcaccaaaccaccggcacgttacagtgaggcatccttggttaaggagctggagaaacgcagtattggtcgcccatccacttatgcttccattatctccacgattcaggagcgtggttatgttcgcgtagagagccgccgtttctactcggagaaaatgggagagattgttactgatcgtctggaagaaaatttcaacgagctgatgagttatgattttactgcgcgaatggaagatcagcttgatcaggttgcaagtaacaaagtcgaatggaaaggggttctggatgagtttttcacggattttagtgaacagctagacgtcgccaataaagagccggaagagggcggcatgcggcctaatccgatggttattacctctattgagtgcccgacatgtcagcgctctatgggcattcgaacggcaaccaccggcgttttcttgggttgttctggttatgcgttatcacctaaagagcgttgtaagcagacgataaaccttattcctgaaaatgaaattcttaatgtcttggaaggggatgaggcggaaacaaatgcattgcgcgcccgtcgtcgctgtaaaaaatgtggtacagcgatggacagttaccttattgatagccaacgtaagttacatgtttgtggtaataacccggcttgtgatagctacgaagtggaagagggcgaatttcgcattaagggatatgacggcccagttatcgaatgtgataaatgtggcgctgaaatgcacctgaaaatggggcgtttcggtaaatacatgggctgcaccaatgaaacttgtaaaaatacccgcaaaatcttgcgtagtggggaagtcgcgccgccaaaagaggatccggttccgctaccagagcttccttgtgaaaaatctgatgcctattttgtattgcgtgatggtgcagccggtgtatttttagcagcaaacactttccctaaatcaagagaaaccagagcgccgttggtagaagagttagctcgttttaaagagcgtttgccggagaaattacgctatctggctgatgcgcctgtggtggatgctgaaggtaataaaacagttattcgttttagccgtaagactaaacagcaatatgcttcttcagagaaaaatggcaaagcaacggggtggagtgtgttttatgttgatggaaaatgggttgagaaagacaaaaagtaacaatttctgacagaatcaacactctctttttctcagaaaagggattattttcttctattaagccaaccttataggttggcttttttcgcctattggcattatcttaaaatatatgaattagaatccggttaaacattcattatgaatttttaattattcgttatataaatatgtaatcgtgttatagtggttatatgcgacaacaatattatttctattcgttataataaatagcaaacagcaatatcagtccaggtttctaagccataattgttcacagcgtttattttgggatggtgtttatatgaaattgcaacagcttcgttacatcgtggaggtggtaaaccacaaccttaatgtttcatctacggcagaaggactgtatacatctcaacccgggatcagtaagcaggttagaatgcttgaagatgaattaggcattcagattttttcccgtagtggtaaacacctgacgcatgttactcccgcaggtgaagaggttgtccgaatttctcgtgaagtattatctaaggttgatgcaatacggtcagttgctagtgaacatacttatccgaatcgtggttcgctatatattgctactacccacacacaggcccgttatgcattacctcctgtgattaaaggttttattgaacgttatccgcaggtctctttacacatgcatcaggggtcgccaacgcaaattgctgaagctgtgagtaaaggtagtgctgattttgctattgcaactgaggcactgcatttatatgaagatttgataatgttgccttgttaccattggaacaggacgctggtggtgacgtcggatcacccgctggcaggtaaagagagtgtttcaattgaagaattggctgaatatcaactggtcacttatacgtttggctttaccggtcgttctgagttagatgtcgcattcgataaagtgggcttaaagcctaaaattgttttcactgcgacggatgctgatgttattaaaacttatgtccggttaggattaggtgtaggggttattgccaacatggcggttgatccggtgcaggataacgacctggtttgcattgatatgcgtgataaatttagctacagcacaactaagattggttttcgtcgcagtagtttcttgcgcagctacatgtatgattttatgtggcgttttgcgcctcacctgacgcgtgatgttattgatcaggcagttgctttacgctcaaatgaagatatcgaagtcatgttcaaagatatcaaattaccaatcgtataatgaaatatacccaatggatttcaagatggatcgcgacggcaagggagtgaatccccgggagcataggtaactctgtgaccggggtgagcgagtgccgccaacaaagaggcaacttgaaagataacggatataattagggagctaatgattgccattggctccctaattttgcttatcagatggggtcaaattcaccactgaagaaatcatcagactcttctattgatgtttttctttgtttgttgatgaaattatcaaaactggctttaatctcaggattttcgagcgcctcatagtctaaaaccgatattaaggatgaatactcaaaatcaatattgatattttcattagaagcacagcttgataaaaagtttgaattagtgctatcaaagttaactcgatagagttttagttttggaatatatacggtcttctctcctacaatcaaggtatcgatagcaatcgttagtgtcacagtagaatagaagcctttatttttccgaatacctaaacgaatcgtttccccttgcttggtcagaaacttagcgaaatctggcagcatatctgtattttcgaatacaaccacattcataatgaaattaaggaaactttttgaaatgcttaaaccatttaatgaatcggtgtaatttttagattcaactttgctagtacccattagaggtagtttgttaacgactttagtccaaaagtccatatctgttttatattgctctccatacttttccgcgtatttattgacataattggttgcgatggaggagagtgcaattaatgtttgacttaagctattagttttgtctataacttctggtttatcagataattgtttggctataatgaactgaactaaaccatctttttcattgtatttattggtattttctatactaaaataagcatcgtcgatgtgaaagaacgtattagcttcattgatttttgcgatatgtttctgattattcgtaattgtgttttttatatccattattttgtccttgtttttttattgataatttgaatccaattgaattgttagcgagttaattctagctgattatcattcgattgtttacccggctaaattatcaaaatttattactgaaattctgatagatacactgaattgacgcattgtgcggtgatgagaaaaaaatatttgcttatatgttatgtttaatttgtgccattatcattaaggtggttttgagttatgccagtataagaagaaggaggagttatgtcgtttgatttaaaaaaagtttgtgtttcaacactttccgctgcaagtaaacaatatgattattacagcttaccactggttgctaaacatttgggtgatatttcccgtttgcccaaatcactgaaagttcttctggaaaatcttcttcgcaatatcgatggcaattctgttgttgttgatgatttgaaagcaattgttgattggcaaaatactggtcatgcagacagagaaattgcttaccggccagcacgtgtattaatgcaggatttcaccggggtgcctgccgttgttgatttagcggccatgagagaagcggttcagcgccttggtggtaatgttgaacaagttaatccactatcacccgttgatttggttattgaccattcagttatggtggataaatttggcacggaaaaagcctttgaacaaaatgttcaattagaaatggaacgtaattacgagcgttatctctttctgcgttgggggcaaaaagcttttaaccgttttcgtgttgtcccgcccggaaccgggatttgccatcaggtaaacctggaatacctgggtaaaacggtttggcatgaaatgcataacggacgagagttggcttatcctgataccttggttggtaccgattctcataccaccatgatcaatggtctcggtgttctaggatggggtgtgggcggtattgaagctgaagcggccatgttaggacaacctgtttccatgcttattcctgatgtggtgggttttaaacttaccggtaaattacgcgaaggaattactgcaacagaccttgtattgacagtgactcagatgctgcgtgcccatggtgtggtcgggaaatttgttgaattttatggagatgggttagctgatttgccgctggcagacagggcaaccattgccaatatgtcaccggaatatggtgcaacttgcggtttcttcccggcagatggtattaccctgagctatatgcgattgacagggcgtacagaacagcagattgagctggtagaagcttattgtaagatccaaggattatggcgaaatcccggtgatgaaccggtatttaccagtagtcttgaactggacatgtcgacggtggaagcgagcctcgctggaccgaaacgtccacaagacagggtggctttagcgcgagtacctcaagtatttcaatcatccgttgatctagaaatgaataaatcccaggggaaagccatctcagcgccagttaatctggataaccagaagtatgagttagaagagggggctgttgtcattgctgcaattacttcttgtaccaacacatctaatcccagcgtactaatggctgcggggttgttggcgaaaaaagcggttgagaaggggcttaaacgccaaccgtgggtgaaaacctcactggcgcccggctcgaaagtggtgacagattaccttgaattggcgggcttgatgccttatctggaggaactgggcttcaatctggtgggttacggttgcacaacttgcattggtaactctgggccattacctgaatctattgaaacggcgattaagcaagctgatcttaccgtcggtgccgtcctttctggcaaccgaaactttgaaggccgtatccatcctctgataaaaactaactggctagcgtcgccgccgttagttgtggcatatgctttatccggcaacatgaaaaaggatttgactaaagatcctcttggtcaggatcaacaaggcaatgatgtctatttgaaggatatatggcctgatagcaaagaaattgctaaagctgttgagcaaattaaggcggatatgtttcacaaagagtatgcggaagtctttgatggtgatgaaacatggcaatcgctggatgttgcgagttctgcaacttatcacttccagcttgattctacttatattcgccacccgccattctttagtgagatgaccgcagaaccagaagcgataacggatattcacggcgcgaatatattggctattcttggggattctgtcaccacagaccatatttctccggcggggaatatcaaagctgacagtccggcagggcgttatcttcaagaacatggcgttgaacctaaagattttaactcctacggttcaaggcgcggtaatcatgaagtcatgatgcgtggaacgtttgccaatatccgtatccgtaatgagatgattgctggtgtggaaggaggatatacccgccatattccgtcacagacacaattagcgatttatgatgcggctatgcgttatcaggaagaaaaaaccccattggctatcattgcgggcaaagaatatggttccggttcgagccgcgactgggcagcgaaggggactcggttattgggcgttagagtggtgattgcggaatcatttgagcgtattcaccgttcgaacctgattggtatgggcgtattaccattggaatttcctcaaggcgtaaatcgtaagacattaaatctgcaaggtgatgagacaattgatattgaagggatgaataacctcaagccgggacaaattgtaccggtgaaaatgacttattcggatgggcatcaggagatcattaatgctcagtgtcgtattgataccaaaactgaattagattatttccaccacggtggtatcttgcactatgttattcgtcacatgttgaaataatttttatccccgttatctttcaagttgtctctttgttggctgcactcccttgccgtcgcgatgcagcttgaaatccatagggtatacatcatactaaagacggcgctgatttatttgagcgccgtcttttcagctagcttactgaaaaactaattttgctcagataacaaatgacccatttttctggctttagtatccaaataataagcattcttaggatttcggccggtaattaatggaacacgttctacgatattaatccctgcttcggtcataatttccacttttttgggattatttgtcagcagacgaatagcttgaataccgagtaatttatacatatctgcacataaggtgaaatcacgctcatcggcggcaaaacctaactgatggttagcttctacagtatcgataccgttatcctgtaacgcgtaagcacgaattttgttgattaagccaatattacgaccttcttgccgatggtaaagtaatacacctcgcccttctttagcaatttgagcaagggcggcttcaagttgaaaaccgcaatcacaacgcagactaaacagggcgtcaccggtcagacattctgaatggatcctggaaagcacaggttcattgccagaaatagtaccgtatactaatgcgacatgatcttgacctgtggcgatttcttcaaagccgaccattaaaaaatcaccccaaggagtgggtaacttggcctcagcgactcgttttaattgcattttattgttcatatgttgattcagactcgttacaagacattcgttacaaagcatagatgtgaaaaacaataccggtctgggaaatcagcggacactgcgtaaaagattttctctgattataatgtggctatattttgccatatttaccgcaaattatctgtcaaaaactttcaaataattatatctacaattgtgatggtatgatggtatggtctgattagcagaatggcattaggtatgcactggtcgcaggacattatcacatcaacgttaattagtgcagtattagtgatggctatctgttatctcacagaaaaatggcggttgattaacgacaaaaaggatttggtggtgtaattgcttcttatttacacttaatcgatgggaagatatcgtaaaagagctgaaagacgcatttatcatgataaattgcttcctttatccagactggaaatgctaatttaatgagccgttatccagcataatgtccaagcaacaatagataacaggaaaaaatgtgaaatattttctgattttattactgatattggtgatctttgtcatctcgatgactcttggatcaaataacgatcaggtcgttacatttaactatctgattgctaaagggaattactctatatctacacttttagctgtattatttgctagcggtttcgtgttaggttgggttatctgtggattattttatcttcgtgttcgtttgtcattaggaagagctgaacgcaagattaagcgacttgaagtgcaactggagcaacctgctgaaccttcggttactgattcatcgcttgcacttagcaaggaataaactcctatgttagagctgttgtttctgttgcttcctgtggccgctgcttatggctggtatatggggcgcagaagtgctcaacaggataagcaacaaaatgctgatcgcttatcacgagaatatgttgccggggttaactttctcctttcaaaccagcaagataaagccgtggatctgtttcttgaaatgctcaaagaggacagttctgcttttgaagcacatttgactttggggaatctattccgttccagaggagaagtagagcgggctatccgcattcatcaatctctcatggaaagcgcttctctgacatttgatcagcgtttgcttgcgacgcaacaattgggccgcgattatatgtctgcgggtctgtatgatcgtgctgaaaatatgtttgctcaattggtgaatgaaaaagattttcaggaaaatgcgtttcagtcgctgctgactatttatcaatcaaccagtgattggaaaaaagccattgatattgctgagaaattagttaaatccggcaagcatgatttacgggaaaaaattgcgcatttttattgtgaactcgctttacaggagatgagcggtgatgatcttgatgaagctatcggttatctcaataaagcggttcaggcagataaaaactgcgccagagtttctatcatgttggggcgcttgtttatggcccggcaagagtacaataaagcggcggatgctttaaaatctgttcttgagcaggataaacagttggtgagtgaggtgctacctattctccaagagtgttaccagcatcaaaatcagattgatgaatgggaaaatttcctgaaacgttgtgtcgaggaagattgtggagccacggccgagcttttgctggctgatattatcgagcagcaaaaagggcatgaagtcgcgcaaacttacatcaatcatcgattagagcgtcatccgaccatgcgcctattttatcgcttgatggattaccacctggccgaagcagaagagggtcgggcgaaagaaagtattatcttgctacgggacatggttggtgagcaaattcgcaccaagcctaattatcgctgccataagtgcggctttacttctcattcgctttactggcactgtccatcatgccgttcgtgggattctattaaaccgatccgtggattagatggtcagtgacagtgtcaccataatattgctttgttagtcaaaaaggttaaaaaatgacatctcataccttaacatcgttcggtagacagattagctcgcctgtcattgttgctttagattacgacaatcaggatacggcgctggcttttgccgataaaattgatccacaggattgccgtctgaaagtaggtaaagagatgtttaccttacatggtccgcagtttgttaagttgctgcaccaacgtggttttgaagtatttctagatttgaaattccatgatattcctaataccaccgccagagcggtagctgccgctgctgagatgggggtttggatggtaaacgtacatgctagtggcggcaccagaatgatgacagcggcgaaagaggcgctgctgccttatggtcatgatgctccattgttaattgctgtcacggtattaaccagcatggaacaatcggatctgcaaggtattgggattgatatgacaccagcgcaacaggctgaaaggttggcaaaactgactcaggcatgtgggctggatggtgtggtttgttctgcacatgaagctcagcaactgaaaaaggtttgtggtcagcattttcaattagttactcccggaattcgcccgacgggcagtgatgtgggtgatcagcgccgtatcatgacgccagaacaggcggtattggctggcgttgattatatggtcattggccgtccgattacccgtgccgccgatcctgcggccgcattgcgtcaaattaatcaatctattgcgggagtgattaatgcaagataataattcgcggttggtctattccacagacagagggcgtattcaggaagaaacggttgaatctcagcgtccaaaaggggatggcattgttcgtattcagcgtcaaaccagtggccgtaaaggaaaaggggtttgcgtgattaccgggattgatgctgatgatcagacgttagctaagctggcggctgagttgaagaaaaaatgtggctgtggtggttcagtgaaagagggtgagatcgaaattcagggcgataaaagagaattattgaaacagttactcgaagccaagggtatgacagttaaattagctggtggttgatatacccgttatctttcaagtccatagggtatagaagggcggatattcgcccttcattcattttactccagagtctaattattggtagtattttaaggtatttgttaataatattcttaatcattttaattagaaataactcacaataaagagataaaatatattattgttaatattctatgaaaataatattttgatattattttttcctcttaaggatagtaatataattaatattatttcttcatttctctgataagatcattattaaaaggcattttcgtatgggaatgagcaactttgatgataaaggcgatgaacattaataattactttttaaatcatagagataacaatttaaatctattttttcagtaaagaggttgactatggagaatgatcgttctaccatgaaaaacatggaaggtgagcaggcgcccaacatcagggaaaacatgttggatgttgtagaggaattaatttacacaagggggattgcggcgacgggtatcgatctgataacgcgcacgacaggttcttcacgtaagacaatttatcgttattttggtacgaaagaggggttgattgaagaagttcttcgtcggcgagatgaacgatggatgcgggggtttacctcatcaatagctgaatataaaacacctaaagagaaattgctgaatatttttttggtattacaaagatggttcgcgagtgatgattttagaggatgtgcatttatcaatacatccggtgagcgccctaatcctgatgatccggtaagaataattgctaaggaacataaagagaaagtttttacttacgtgctgtctatttgtaaagaaatatcgccggattcatcagtggatttagcgaggaagctcctgctcttaatagaaggcgctattacaactgcgcatgtgatgaatgatacacattatgctttagaggcgatgaatattgccgaggcattgctgagtaaatacgatgtgaattaatggaaaatttaattaggagacaatatgtctaatacaaaagaaattcgccagccggtgccaccatttacccgcgaaactgctattcagaaagtccgtttagcggaagatggatggaatagccgtgatcctgagaaggtttcattggcctattcgttggatacccattggcgtaatcgtgctgaatttgtgcatagccgtaaagcagcacaggatttattaaccagaaaatgggcaaaagagcatgaatatcgcttaattaaagaactttgggcgtttactgataatagaatagcggttcgttatgcttatgaatggcatgatgattccggtaactggtttcgctcatatggtaatgagaattgggaatttaacgaagatggcttgatgtacaaccgttatgcctgcattaatgatcttccgataaaagaatctgagcgcaaatttcattggcctttaggtcgccgccctgatgatcatccaggattatctgagttagggttgtaatccttttcaggcgctggtcgagacgcggccaatgcgcttgtactccctgccgagggccttctgattaacagaagagttcagaaggctcatactttgaatttatcgtttgaggtaggacagatttcggttaatgcagtccgtgacctgatgaagttcgttagtgggaatatcatcagtgacatcccgtgcagtatgagcgaagttggcggcgacatccgctacttcatcaatgatattgttcattctggccggcgcgatgcctgcatctttggcaactttcaacaacatggtgcgggtgatatcggttccgtagccggtcaccgaagtctgatgctgtccgccggggccatccgcaaaggttagatcataggcgggggacactacccactcattgctcttattcaaaatgaaggagaaattcttcacatgatcatcacgattatgcatcaacacgttgaacaccatacgccggacctgggtttctcgcgcaacaacagagcgcgtgatggagcccgtcgcccgtaagatatctatgtaatccatacagggtaatcgaaagtcggcatgtagggcgccggccatactcagtaccggcacccgcattccattctcacgatcgaaacgctggacaccgaaagcagcaagctcccctccaaggcggaaatagcgacttgtggggaaatcaatgcccgctattctggcagtacaggcatatgcttcttcaagggcacagacccaaggattctcctctgctgcggggaatttgaccaaccaaggttcactttctgggaatgcagttgttttcatctggccggtggatggattgtattctacctgtgctttgggtctggctccgtgaggcgagccgccaagcaggaaaagttcacgcagtgcctccgaatcctgaccggtgacttcctgacggatctgctgagccagtccagtcaagttcagaatactgtatttgtcttcctgatcctccggtaaaggcagaacaggttggtaggtcagagcccccatcgtgttatcgctcagcaatgccaggcgttccaggacggaaatccggccgggatcgacatgattacggcgcaggaaccggtccataagcagccgtccccagccatccggcagggaatctgcgatgaaaccaggaagccagtcctgaaagtgctcaaaattcgcgtaagtctctgtagaaagtggcagttgtaggggcgagaattcgataccattatcaagagcttcatgggtgtactcaaataaatagcggccactcacagtactttcggccagatgacctaacacccactgttctcctcgcccgcggtagatcacttgtagtcggcccagtgaccggtattgaaagttttgggtcgtcatttttttgcgtctcctgattgatgagcgcggccattgcctgagggtttccgagacgaacgttgggttcgtcgggcgcgctggcgaactggtgctttcatggcttcaagctgtgcaatgctagtcggttgtagcataaacagggacttaattgcgttctccagccgcagagcaaagacgaccttcatgaaattctcaagcgtgccccgcccgctgccttcaagttttttgagcgcagagacggaaataccgctcctgagcgctagctctgtttggagcatgttacgccgtaaccggtgctcacggaggcggtgcccaagttctgctagcaattccgattcggtataaagtattagagccatgaatacacctattaagtttaaattttatagttaagagtctttattatacctcttattttaccaaaatctgatatgaaagtagaagagtttaagagctctatttgaagcttataatggtatttaagatactttaaagttttatataagtcttttataaaataaatcttccgtttcaaacagttcatgaatctggtttattcgtgttggtttctttaaggatttactgtcatacttacctatacatcaaattttaaaatgtgaggtaacatggaaaaacatccggtagaacaatcacctaaacttgatttctcaaatttagattttgttaaattcggggaatacctcagtgaatataatattgttgataaacaaggaagataccttcattggagccagcttaagtggcgagttcctggtaaagaagctgaacacatctggtatgcggtaaagttctgtagagatcagttgaaaaaaagtacgggcttatttgataaaagtgggaatgaatttagtttttgtatacatgattcactagaaccaaagttgcacaaaattgtacaacttggtgccggtaaagtcgccgcacttgcaggatctcaagcatcagataatattcaacagaattacttagtatcatctttactgatggaagaagccatcaccagcgctcaattggaaggtgcagcaactacccgagctgatgcaaaaaaaatgctagaggaagaattagcgcccagcactcctgatgagagaatgattctgaataattatatgctattaaagctagcggataaaagaaaacaagaaccccttacaagggatctaatgcttgaatttcacagaatagcgactaatggtgtatctgaaaatgaaaatataccggaggaatttagatgcagtaatgatatctacattggaaatgatgacaatccattattttacccgccaaactatgaggagttagaaaataggttagaagaattatgtacttttgctaacgaaaatcataatggagaggatggcaggaggtttataccaccagtaataaaagcgattattcttcactttatgatgggatatgaacacgcatttaaagacgggaatggcagaactgcaagggcaatattttattggtatatgctaaagaatggatatgatatttttgaatatatttcaataagcaaggttatcaaagagcaggctaaagagtatggtatgtcatatctttatgttcagaaggattatggagatttaacttattttatcgattttaacgttaatattattctaaacgcatttgatgaattacaagagtatttaaaagtaaagacaaaagaattttatgaaattgtcgatgtgttggaaaattcaaagtataaaagtaagctaaccttcattcagaaagatttaattaaaaaaggtgtaaaagaacctggaagattgtttaaagttaaatcggttcaaaatgtatatgatgttagtgaaaatacagctagaaaattacttagagagcttgaggcaatgaatatattttttcctataaaaataagacgaacaacttattatattgcccccgcagatctacgtagtaggctaaataagatatcaaaatcgtaggcagaattagtgcagtttaaaataaataaggcgagaaaatatttctcgccttatttattagtgtttcaagtaatacaaagagaacttttaattatccataagtaggaaaggggcgataccaacaattttttctgttatgagattataatgcagatttactgcaataacagaataaattattgctccgtcgggcgtgagagtcgccgaacgttttgaacgagaaagaaccaccgttggttgtagtttgggttcataaccaccgccaaggccggtatcatgtactgatttcatatttattctgttcaattcttcacgacaggcaacaaaggttatttcatcatattttgccatcctttcgttggttttcagcagcgtaaaaatatcggacaattttttacgattccccgcttccgggctgactaatagtgcgtcatatttattgatattcgtactgtctgtcctatttttccatactgccgctttcacttcctcatcaggcattttctcataatatttgataccgtaatttcttaccctaccatgattaactgtattggcttctactccagtggctagcagataattttcaatatcattggtagccatattctgaatatcgttcacggtaaacgtcttatcacctattcttacattagccagacttgctgtgttgcctgctttaattgttgcataaggttgtacagtcaagccgctattacctaatgtaacatcaaagggagaatttaatggattttccggtgattccaataatgtctgaccgtggggaccaagaaattgaatcgtttttcccgcagggacttgcgtcattgcactatcagagaaaaaatatccatgtgaactcagcattaatctattcgccggttcattaggtactgtccataattcgaatgcaccaccaagctcaattttttgtggttcaagttgaggatattctttttgtaaaatctcaattctgaattgtgcttttctttttctcatatcacctgatccaatatctatatccgcccctggttttttattcgcttttcgccattccttcactctgttacggtaatcagtagctgattcatcgggcattttttcaggttttccactacccacacccatgacattgcgggatgattcatttgtgcttattctagtacttgttaatgggatttgactatctcctttaccataataaggttgaataacatactcgctttcacctttgaatatggcatattctgctctgaatctattttcagtcaataaagccgaattgttttctaataaatagccagaattactgaaatcaaataacgtatttttatcattggcgtaatattttgttcccacaatgcgtgattcttccagcaaagaaaaaccgccactgactttttgatcaattattttattatcgatagaagtaaaccatgttgggtaacgattataatagatatgtagcatctcatgatataaagcgatagcaggctcacgggaacgccaaggctcctcgacaagtttttcttctgtgccaatcaagtgattctctgggtcaaaggcaatactgctaccggcgctattatgggcataaaattgaccatttttctcgcgtacaatggcatccatcgttggtggttgtatatttaaaccctgtttttcaagctcttgaataacgatatttccggaagggatttcacttatttcatctagtacgtgagtgacttgattaataaagagatcattacctgttattgtgatcccgatagggggaatatttacgcggttactctctatggatgtgtattgtatcgttttttggatattacccgaagagtattttggcatcggtgtgttaggtatttcttcaatagctagggccattttattgattgccgatgcattaggtaattgatttccaacaggatagatttccctcaatagataaggtagttcggttttgatggcattaattttttcagccgaaatacttaggttttttggtaatagattgttttgtaatggtaagttgacttcacgtatccaagcttgttggatattcactatctctgtgttgagtagggcttgtttatctccaagttttaaagatttttccaagaaatgggttaatgtatcagtaatatctgatagtttatcgatatcatacttttcatgatttttgaatgcggtattgatatgaataaatgcatccaatattttatcgttattaatattactgcgtgctgcttcaagttcctgatctatttttttactttgctccaggataagaaatttattagatacatcggtatgagtaatccaatgtccatttttatctaatttcaccgcaggccagtaactaaattgttgcggataagctggattggctacgcgccaggtgtggtttgtttcatcccatttgacttggtaattagcaccagattcctttatatagtagttctgtttaattgcggtttccacattagcagggcgtattgaatagatccctttatatattccctcatttgcatgagctaccattcggttgagtgaaatattgctgacttgccattcatttttcagtttaccaagccctctggtgcttttgctaaaaatatcggcgaaacttttctcaagtttaatgctattttttatcacacctactgcgcttacgactcctcggtaagttaaggtcaatgttgatctaatgggcaaaggttcgattaaatcgattaatccaccgagcagaatgcgggaagattggcgtaaagtgattacgccatgctctggtaatgttcggataaccgctgtaattagagctcttccggtcagaccggcttgtctgaggcgtaatgtagtttgtgtgactttagcggccattgattcagtcaatgacatacctagggtagcaacaactaacagcacattcgcggtatcaaagataattgaaccgacatcctctcccgttaatgtatattcactatcggttgttgctttatagataacattatagaaaggaatcagaatggttgccgcgatatgccaaccagaggtaatatccagagcttgtttactttttattgcaatatcgtttaagcctttctgcactatcgttgtggtaacagaaagtaagttatcttctttataaaaattaaatttaggtgagcctgtgaaactaattccgacattcattcctgaggttataccataataatcattccaaaatgcgtcataagaatatttatatcggcttgtttctgagaagccgcttaaggttttggcccgttcatagccaatcgggaaaagtctttttcctgtacgaaccattctatttgccattaatatccccatgcctatctctattttttgctcaattaaaaatagtgcattgggtctagacatagcacgtaaggtgggctggctatcaacttgttgttgggaatattttcttgccttcactcctccttgtattgttgagacaaccaaccaattaccctgatacatttttatcatggcgacatttcccataccctgttcgactgaatagagaaaagcttcttctggtggattaacaatctcttcggtagttaattgcgcagccggagatgaaagtattaatttactaagtaaaatggattcataatcactgtatttgtttttataaacattaaattgctcattaaaattatattgtgaatcaaatttatctctctttttaaaatcgataaaagaaaagtatcctgctggctttacgttgtttttattgaaaggattaagtttttgcttgtcattttcaaataattttattgtttctaatgtagaatacttaagtgcttgttccacattggcattctcttttctcattcgataaatgattgcggctgttaaaataatacagccttccatttcaatatgttttgattcttgataaagaacatgatccgtatcatagtgaatattattttttttaaataataattcagcttgatcttgggcaaaaattatatcgcgataatcaccatgaccttgagtcatttttccgattttaggagcaatctgatataatagggcacctaatgaagataagactaataaatgatacttagcagcttgtagagtttgcaggtcaagaatatctttctggctatactcggtacgatgttgtttttttaatgctacctcttctttggctagtagagctaatagtatgtcatctccaatgctgatactttggtttatttctggatgaataatgggaatgcctggattaatattattagcagaaattaaactattcaccttttcaataccttctttataggatttgaaaagatcttctttatctttgattcgttggttataatctgatttttctttatcatttaatgctacattgccatctgacataaaagttagcaatgcatctgaatagacctcatcatcgatatctccggtagagaatgcctgacgatatattttcagcaaaggttcttctgcgttaatctccagatcctgccatatatcgactttagtttgatctgaatcgactttatccttatttatgcttgctaatttttcatgaatttctatctttgatattaagatattgattgctgtatcgatatcagagctgttataattttttataaagaaaaggttaaatatattattaatgttattcagtagctcagaatattttatttcggaatattcattgaaaacggcgtccacagcttgtttcaaagtctgttgtaatgtagttgagtatttattataagaaagtaaattttctataatatatagagccatttctttaatatcagaggttatccaagttggatagtcttgattgcctttcagtaggtgaataaatggcttattttcattttcatctcgcttatactcccaatattttccattgaccgcagtatattcattttcttttaattgataggtgtcgtttttattttcgatatcatattcaaaatgtgacatataatcctccaagttgattaaatttattatttatttagctatatagctactatatccatttgatttatagaaatgattgttcatataaaaatattattttttgattttaaagtcacaatcataaggtagggtgattatagttaatctcaattaatataaaatatcaattaataacattgtaaaattattaattagtataactatatataactatatatacccgtaatcattgaagatgcttgattttatccgaaatggagatcattatcctcgctatgaaaatattcattaccgatgaacaaaaagccgaacttgaacatctccatcacacctgccgtgataagagggagtgtgatcgcatcaaagcggtcctgctggcctctgaaggctggagttcagtgatgatcgctcaggccctgcgtcttcatgaaatgaccgttaaccgtcatatcagcgattaccttaatcaaggtaaacttaaatctgataatggggggtctgatagtttgctttctcaagaacaaactgattttttaatcaatcacttatctcaacatcttttccatcacacccatgaaatcgtggcctatgttgctcagctctggaatattacctttagcattcccggcatgaataaatggctacaccgtcagggtttttcttataaaaaaccttgtggcgtccctcataaattcgacgcagaaaaacagcgacaatttattgaatattatgagaatcttaaagtcacagcgaaagacgaacccatcctttttcttgatgctgttcacccgactcaaggcaccaaactcggttatggctggatgcgaaaaggcgagaaaaaaacagtaaaaacaacaggaagccggactcgcctgaatatattgggcgcgctcaacctgaatgccattggtcgtacggtgttccaggaatatcaaaccatcaatgactacaacatttgctgttttttcaatgaaataagaaagtcttatcctgactatcatcaaaaaattcatcttattgtggatggggcgggttacaacaaagctcatcttgttaaggagtgggcttatgttagcaatattgagttacattaccttcctccctatagcccaaatttaaacccaatagagcgattatggaaggtcatgaatgaacaggttcgaaataaccgttattttgcggataaacatgaatttcgagacaacgtcttcaaatttttcaccacaacgctaccggatatagcggactcgctgatgtctagaattaacgaccattttcaggtgctaaaaactgcatcttgaagtttcttgggtatatacccaatggatttcaagatggatcgcggcggcaagggaacgaatccccgggagcatagataactatgtgaccggggtgagagagtgcagccaacaaagaagcaacttgaaagatgacgggtataaatatttatttatagctttttataattatggttaggacaatgtatctgctgaggagtgggctgataaggtctctgtggctaatacgggggttatcgggtcgggcaaggagactttccccctgcgcgatgcgatccgctaccgtgggtatccccagtggcctcgctccacccgtcgtttttggtatctcgacacgccgaaccaccggcggcatatagctgcccgaggccattcgattccagagtttgtacaagtttcctacgaggctcttctcaaattcctcaatcgattgaccatcgattcctgcgctacctttgttggcttttaccttcttgtacgctctccatactgccagtttggataacgcaaacggtttgggctggttcaccggttcctcccacttgtgcagttgacctgtaatacagccccaacgactggccccttcgctccacgttcatttcagacgtttcatcactactacggagccatctgcccttgtgccccgcatcggtactcaggcgcttgcaggttttctgcttgacgccgctcccttcacatcgggacgacaggttcccacgttccatggcagagcctgtgttgtgctcatgctgtctatatggttacacaacaaggtataagctactacgccttttccgcgaccaagatatttttttgaaccgtgggcctttatcatcgggtattcaacgctgaacttttgtccatcaacggcggcatacaatatgcccagctccagagagtaataaggaaacacagataactctttgatggcgttactgatacaatcggtgggggcttttagtgaagacagacgcagatattgcgcatagacctcattcaagacctggtagggaatacatttgtaaacagccaaaactctctaataagcaacagaaagaactaggactcattgaaaaagatccagatgtggttggttatgtattatttaatacgcgtagccgccgatttgcgacgatggatgaaaatgagtttggcatggtgatgtacgccgatgatcttgaagaagcctatttagcaccgttacgacttgatgcgttaatgaatattgattttttaccgggatcagaccagaacgataatgataccaggccatcatgctgtttaaatcccctgccaaaacgtcaacagcccctagccaatttaacatcatcaatccatgacaaatttttcaacctaacatgcaaaaagacaactttgagtaattcttcaacagttagcatagccaaaattgaaatataagtacagtttagatgtattataagaacagttgaaattggtatggatactaaccattggcaaataaaattcaattttaggttatttttcgtatcaccgcaattttgaagtatagttagataatatacagatatgcattttagcaaaaaaatcaatgggaaaaacaatagatatgtaaaatcatatcttacattataatatattgaaaaataataaagcactataaagaaagtcacgctagttaccaatgaatataagtaaactgataacttctgcttttttaaatatctatctagctcagctatgctatatccatatcctagtcttctggcaactaatatcccagatgaagtggctactccccaagatattgctaagaatgcggattctatggaggaaataacagagtgtagagctatataatcaactcctagttttccaatgagaaactgatacgtagcgattccaagcgaccatattatattggttaataaaataggtagaaactttgaaaaataatcaacaactagtggcttaaaagaatttaaatatattgtgcttataaaatacttataggtgtaaatttttactaatatataagaaccaacaattgttctgattattctagctattgttgttgataaagctgcacctatgatacccatctcagggaatgataaatttccatatatcataacccagtttaagaaaaccgcaattatgacctctagaatggttatttttgttgatatggatggttttttatgacacctattgattgtgtcaataattagtgatagtgaactaaataaatataaaggtgaagtgtattttaaataagttgaacaaagaagcgagacttctaaattatcggtaaaaatagaagatacatgataagaaaacaatgcctgaataatagactgtattgtagatactgttaaataacttttcaaaatagtagaacacttggagggaactcagtccaatttttgcaatctgatcaattgtagataatcccaaaccactaaacggactgagttatgcctatcatagcacctataccccgcaatgaacgacgccagatgaaaaaaattatccagaacacccgagataaagattatgctcgcaggctcatggccatattgatgctgcatcgaggcgagtctgtctctctggtcgccaaaaccctttgcgccagtcgttcttctgtctatcgctggataaactggttgactttatatggtctggaaggactcaaaagcctgcctgtgggcagacccgctgtctggaatttaatcccgctttatcctttactgtcttttttattgcaatattctccccagcaattgggctgcctgcgttctcgctggagtcttgagttttttataattaaaatcaatgaattattaaacataaaattatccatcagtaccttctatcgttacttacataaaatgggtatcgtgtggcgaagggcagccccgacgcttaaattacccgatcccgagtaccatgaaaaaatggcgaaaattaccgaggcattgtcaacgtgttcagaaaaacatcccgttttttatgaagatgaagtcgacatcgagctgaatccaaaaatcggggctgactggtatttaaaagggcaacagaaacgtatagtgacaccaggaaaaaaccaaaaacattattttgcaggttgcctgaatgttcaaacgggaaaagtgacttatgctgacgggttaaataagaattctcatttatttatcaatgtattggaagaacttgaacgccagtattgtcatgctgaaaccctcactttgattttggataattacagtatccataaaagccgacgggtcagagattggctggcttgtcatcctaaatttaatctgttgtttttacctgtttattcaccctggctgaataaaattgagcgtctgtggcaatccttacatgaaacggtgacacgaaatcatggctgtcagtatatgtggcaattgcttgagaaagtgaaaacgtttttaaattcatgtccctacaggaatagcagagaataaaaagagtgagtgtattataattatgaaaagttatttaataaaaacaatagagatatttgtattattgaagtttggctttttacatttcccgaaccaacataattcgataaaaatatagataaagtggcagttaacgatatgagcaatgtaatgtttagccatgttactttagccgcaattccaattgcggcgacattggcctcccctagcttagataccataaaaatatcgatataacctaagcaagagaaaaccaaactctgaattgaaatggggatggctagtcttaatatttcactaatcttcatagttttatactataaacttagagtatgtctatcactattttacaagtagaatagattcactgactgagtttaactttatcttatttatctcattgttttgagtgtatacttcttggaagttatattttgaataatttattctttccagaagtttaattaaattattgtcattgtataaaatggacgaatagagtattgagaaagagaatgctttttcaacaccaagctcattcactctagatataatgtcatcattatctattttttgggacaagaaatagtaatattctctaacatcacaaaattttattaaattgatatcttgagcaaaattttcccatgcttcgtttgaagcctctttatataaatgagtgcataaatggataaagaaatcaatattggataatgtttttttgttatttagaatagaataagttgataggattttttcattaatgtctttattgtcagaaaatgacagtccaaaagtaaaatctatagatataatatcaacagtgggctctgggtggattttacaaaatggtggaaggttaaacatctttactttccacattaatttgtcttcacgactaagttcagttaacgttttgtcattaacattatactctccttgaatataacctaaattattcataatttttggcaatctttttaagtcatttttgctaacaaaaaaatctaagtcgtttagtgttcgtgtaccatagtcggtatatatcaaatccaacaaaacagagccttttagaggccttatatcaatttcttcctccttaaatgccgttaaaatagtaatcaattcatccataagcacctgatttctcttggttgttgctaaataaatatattttatagcacttgctactctataaggtactagatggagtaatttcatttcagacagagacttatagacgatgcctacaattttttgcctattgactactgaaaggaaccgatcccaaggaaattccgtatgattcataatatcaatcaattgacttttattcacattttcataatcagttctacataaggaagttaatgtgtataaaatttttgaatttgtaactatagtattcatatcatatacctctttatttaataattactgtatacccgtcatctttcaagttgcctctttgttggctgcgctcgttcaccccggctacatcgttatctatgctatcggggatttactcccttgccgtcgcgatgcatcttgaaatctattgggtatatatatctgacatctcttagggtagggcccgcttagatcgacgatgctagaatttttaacttcttctatagataactgaataaatcacaaaaaatttattacatttagagctctgcctaattttatcgattatcgagaattgttcagtgagtcgaacatcaagagagtggcgttctgccctccgaggtgtactggcttatttttatgtttccgagttcctctggagctactttttttatttcacgtttaaatacgccgagtatactcttgtcataacgtcacctatttatctatgaagtagattcgaatacctccatcatataggcatataggtcgccaaattcatatgcgctacacaaccaattctcttgggaatagattgtttcttagattacttagacgggcaagatattgaaaagagaataaatcatatatgtgactggtttcacattattgttatttcttatgatttgactttaataagtcgtgctaaactaaaaatagtgttaatcatgttaaattggagtggttcatattgatgggaatattaaatttataaggttaactatatctctaattgttaatattgttagataactataatctataactttccatactttgtgaatcgtgtctctgcattgatagtgaaatgtaaaaaatataatggtagttagtgtcatatatgtgtcaccaatttaattatatgagggagaaattatgaaaatttcagtaataattccaacaattaataggccatcaatgctactgaatgcagttaacagcgttaattcacagaaattcttgaataaagaaataataatagttaatgatgcagaaaaatctattggtaacatttttttacatctacctaatgtgacagttattgaaagtaacttaggtaaaggcccaggtttttgtcgaagtattggatgtaaacatgcaagtggagattatataactttcctagatgatgatgatataatgttacctagttatttggaaagattacatgatgaaattttaaataacgttgataaatcttgtttttattggtcaagcgtgaaagttttagatcgagtatccgaatcatgtgtaagtcaattcgatataaaatttcctattgaatatgatagtttttcagatttggcagtgacagctttaaggattggcactggatatggacttacttgcgcaagagaagtacttaaggatatcggatactttaatccaaaatacagatatatagaagatacagaactagttgttcgattgctaaagaacaatattcatccggtacctataaatcagatttacattgaggtcaacaagcattctagtaatcaattaacatcaagtaaattcaatgaaaaaagaattaaagaatgttacaaattactttgtgaacagtctgatttcttcgataaatttccgacagcaaaggcacagctaaatagacaaatattaaagttggaaaatgagttgtattctatctactgacggtagttaattaagtattaattaccaactcgcactctagtgcaataatttattaatgataaacccgtttggagtgagtgatggattactacttaaatagactatcaaatcgagttacttttatagaccgccgtaattctgagttttacaaatggctatcaacaacaccagaatttcatatatatggtgatgatgcaaaagaaaaactcaactctaacttatttaggctgtcaaaaatatgccctgagttatttattcactacacgataacaactgacttgcgtgttaaacctgtaggtgaagtaaaaataaagataatggcttatgaagattatgagcatgaaatattatctgattataacttgataaaaccacttactttatttttaaaagaaactactaatggcttaagttttttctttgtcgtaaatcatttcttatctgatgcactttccaatggaatgatttcaaatctgttatctggagaggatactaactgggatttatatgagaagaaccatattaaaaattttgtatcttctaaactgggtaagaaatcaagaaataataaatataatttagattttataaaagaatactgtgagttaaaaattaataactccgagaaatcaagatttccaattagagatatgaaattagagtccagtacttcagttcttcgtcataaagttttaagatctacatcagacaatatgattacagcccatttaattaaagccatagcatcgtcatttgatgagtactttggaggagaacacctatatatagggttaaatcaacatggaagagaacctacttattcgatagatcctagatatacattaggatggttgaacgagatacggccgttgataataaaaaagagcgaaaatggttactgtgtcaatgatatcaaatccagagtgctaatgagcactctatatggtggagatactaatactctgcttgctagtaacactgaatatggagaggttggtatacaatttccatcaatttgcctaaatgtaataaataaaaaatggtttacaggaaaaattaacacacagtacaaacataaaattttagtcaatgatcgtggagcatgtcgaattatgcatataggtattggacttattattgactctgaatgttgtgatttaactctagacttctcttctcttgattacgaagagcattatattagagggttattttatttgttgattgaaaattttaataattcacacaatataaattttaaataatatgatgaacactaaatacgatctattaaagaatattctttacaaagaatctgggataaatcctgattatttggatatatataaaaaaggctttaattctagagatgctgtcaagtatttcttggttaagaagcccggagaactaataagaaatccaattaatggagctcctgttttaacattcatgtcatatgagcagtactttaatagtttaggagttaatattacttatgatgatttgagtcattattctctagaaaagaattgttttagagtgattaatccttgggggtttgtaggcatacagattggtgagtctgctttgttctctttaggagtatacaaccctaaagatatggaaataaatggcagaaattataaggtttactatgattttgttcaccctgaatatacatggaaaggaaataataaattcgaactatttgactgtcctaaaggtgaatcattcatatgtacatcatataatacatggcaaggtgattttacaggaaaacttggtgttaataattttcaagatctatatgaaccaaataaacagaccactattatttatgccatatgggctagcgggattaataaattatgtaaccttataggtatgaagtttgatttggttaacttagtgaaatatataaacaatgaaaagaagtttccttttgaagtgtccgaaagtggtattctctcagctattcatttagttggcccatataagttatttgaagtaataggtaatggtggctttataactgatgaaataggaacaagtgctttctcctatattgaaagcttctcattcttggagattgatcccatgttcaatcatgtaatggaggaactatgtcattcaatgtaattgaatatttgtattattcatcaaataatttttctcagtctattttttatagagatcatcccattgaaattacatatggtgagttcctttccaaagttgtttatttttcagattacttctctgaagtgatagagaaagtagttgctattgatattgaaagaaaggatataaatatgtattctgttttttcggcaatgtggaaaaacaagaatacgatagttcctttgatttcagattgggatgatgaatataaagaacgaataattaatgcagttaaagctgatatcaggctcaatcaagatcttagtgtatatcatataaaacataaagtagatagaaacgattcagttattataccagcaaaaactgcatacatattgttcacatcaggatctaccggtttacctaaaggagttccgattacacatttagccttaaaacattatattgataatatctatgaagaattggaaattgaaaaaggcatcgaacgattaactaatacattttctccagcttttgatcttttttatcatgatctatttctaagttggaagagtgcaagctccataactccggtagaaaccaaaaaaattggacaattactaaataaggtggaaaataataaactcacttattggttttctgttcctacactcgctcagatgctgatttctctcaaaccaaaatcacatcaactgtctagtttaaaagtttctttgttttgcggagaattattaagaaaacacgtcgtaacctcttgggcacaaatatctaattgccagaagatatttaatttatatggaccaactgaaacaacaatcgcatgtatgataagtgatgtgggtattgaaggcccacctagtcttggccgagctttaggggatatgtcatacaaaactgagcatttatctggaaatctatacaaattattattgtcaggacctcaaatttttaatggatatataggtacttcaaagaatagctttgtgaaaatcgatggtaaagtgtattacgatacaggagatttagtaactatattagatggtgaggtatattttgagggaagaatagatcggcagactaagattatggggcatagagttgatcttcaaggtcttgaagaacaattaagggtaaagaacaataatcctttggtttttgttgttctttattatgacaaaaatatagattgcaatactggaattacaattttttatcaacctaaaaacgaaggcgaaatatttgattgcggattcattaagaatgttaaagtgaaaggaattttttgtatcgaatctgtacctacattaataagtggaaaagtaaattataaaaagttggaattatgggcaaaaaatcaaatttagatattgaaataatagtaattgagtttatgaagaaatatgaaataaaatcacttgatgacttggattcatttcaaattgtttctttgattattaatttggaaaatgagcttgatatcaacctactagatgaagatcttacgtttgatgatttttctgatatgaattcaattattgtcttagtaaataaatgtcttatttaatgtgttttatcaacttatcataaattggttaggaattgataaggttaatgataaaggaaagctctatataatgggcatgaggttaatgtttttgtatgtgattttataattcataaacaggtgtaaataagcttagattgtgcaatgaaattattgtaataattacatccgttaataatattgtttatttcaatggttctatgaaatagaatatatgtaacaagagaaggtgaacaaagtatcaatttgcattagtttttattccattctatttggctttttcttcgaggagaagaaacaatgaaaaaatctaaagtaattgattcatactataattattgtctaaatggttggttgcctgaagcaagtaagaagtacatatcggtcttaaacaaagagtctgccttccaagagaagattctatcaatgtttgtatatgcaaccggccagagtagcgaagagtattgtcatattgaaaatgaaaagagagaaaaatcgatcgtacttaacgatatcgctaaatcctcagaactaaaaaattctgttctagttttgaaggggttatctgtagagcgcttttaccatgaaagtgcctcgcgattcgcttttgacgcagatttggtagtattagaagatcacttaccattgcttgatgctttgttgattaagcatggatacgatatatatttcagtactatttggataaaggatgttgttacagaaaaagtttataaatcattccgatatacgaaagggaaagatgatgatcgtggatttgaaatccatgttgatcactacccaatcgatgataatggttcgagaatattactacagtcgttatattctggctgctacaacactattttgagagggacatatgtcaatgtagttagtgatcttaattctatattgataatacttattcaaatttacaacaaagattatctaacaattagggactttgtggatcttctcattctgcttgaaaatagcgattttaaagcatgtgagcacatagtgagaacactaattagttcgcatggattaggtcctgctattgcaaagcttcgtcaatatattgaagctaatgaaattgacgttagcaagtatccaagtggtgcggacatagtcaaaatggtttcatgggaacttagtactccggacgttcctcaatttgataaaaagtgcgttgcattaatatcagacgatccaaccgccaaatcacgggaactgtttgataggggcactcctacaagattctaccgtttgtttaaaaatgagaaggtagacgaaagtaatagcttcaaaatggaaacaaatattggttgtttttacgggcaagtaacaggagattttgttgtctatgaataacaccaaaatactctcagaattaagtgctaaaggttgggtgtgtgttgatacaccttcataccttggccacagtgatgatatgttcactaattatattcgagacactataggcatgcataccttcggctttcggtctgagattctaggggatgtcgcgtctatcctatcccctaaagaaggtattgttcaatctagaaaaaagttaagaggtcacactgatgcaagctttcttccattcgataccgagtggaagaaagttagaggtctgtcgataatcccaaactatgtagcacttctttctatttgtggcagtgatgtgggaaccacagtctgtcatatcgaagaaatcttatatcacatgaatgatgatgaaatttgcgagcttagttcaccaaattatgtatttgagtggcaaaaatcatttgttatggagtccaacgagttagatagttcttggaagcctatccttcatttttctgatggtttttttcaagttcgattctctaactcaataaagacttataaaacagagaaagcaaaaaaatgtgcgataaagctttcttcattatatcaacgcttgtgcctgaagattgcgctgaaaaccgaccagttactcatcgtaaacaacagaaggtgcattcatggtcgagagtttatttctgaggaaagctttagtagaaagttgcatcgatattacctctatgaaaaagaggacctagtggttaaaacggatattaaggggattgtattaccatgaaaattaatgacagttataaaaagaaacctcatagcaacgatctgattgagctggaaaaagtattggatctcggtaagctttcagggaaaagtgatactgttgagcaatttgagaaaaaaatagcagagttgttcgaagttgatgatgtagtgtgttgttctagtggaacgagcgcacttattgctagcctaatggctgaagacatttgtgctgatgatgaagttttagttccgtgttatacgacgatacctacaacgttcccgatcctatcagttggagctaagcctgtatttattgataccaaaacgtcacatacaactgaactatcgattgacgatttactaagtaaaataaatgataaaactaaggctataatagctgtccctctatggggatatccagtcaattatgatgagattgctgaagtttgtaacagtcgaggtatcattgttattgatgacgctgcgcaagctcacttcagtacatttaagactggtcgtctggttggaactttctctgattatggttgcttctcgcttcatgataagaaaatcctttctaccggagaaggtggctttatcattccttcgtctcctcaaagaactaagcgtttgcgagaaatagtcaaccttgggaaccttaatggcttgtcatttggcttgaatttcaagctaggttcactccaagcggctttaggtatctcaagatgtacacgagtgtatgatgaacttactattcgtagagaaaatgccgagaaaatcaaggagggcatagtgagcacgagatttgaagaaattgattgcctaggacaacctaactactacaacctagtacttaaagataaagatcatagagaccttggcaatgttcatgaggtactaaaagatatgggatttgaaacggactttctaaaatatggggaggctaagtataagtttggtatcctcaataaattttatgatggcagtattgagaaaggagatactgtcctcaaaaatctgataaccattcctacccatccagatctttctcaggaaggaatcgactatataattgaaattctggagaaggtttcatgctagaaaaaagccttattttaatcaagccggatgctgttcatcgagggcttgtagggaaaattatcactgagttcgaagaaaaaggattcaaaatacataatatccgttctttggtgctaaatgacgaagacttctacttcttatatcccaaaattttgggtaaaccctttcataagcagttcaaaacggtaatgcagtcagctccatcaactttgctggttctgagtggacataatgctttaggaagtatatttaacttcgccggagcttactcaaacccagaagaagacactacacgttcaataagacaaaaatatagtgtctggacaggtgcagatgtaatccatagagcagctgattccaacgaagcgatgaagcaaattgcctatttctttgatgaagtttgcgagtatagacataataatgaagcttttatggctaaagagtattgggagcctaacgtctaaaatagctggttctgccccttagttcagtgaagtgagagctcaaatgaagttatcctaccaacattatcagttctgttagaataaagttggtaggtacatcttggcctgacctcgataactaatgctaaatttctttagtaataaccgtcatgttactgttgtttaatcctgttattatggtcgctacaaactcagacggagctgggtaagatcctttttttattctgccgccacacatagtcgccggttagattgatatgttcccaacccaatggtgacagatattgcaataattgttcatcaatcacattgccagccgcatgcagcgactgtattgcacgttctaaatacagcgtattccatcgtacgattgccgctgtcactaaattgagtccgcttgcccgacccgataacccggttttgccttactctttacctgagtgcctggcagttttataacggatttcagtttggtgattgccctaaagagatgaaagtgggatttggagaacagggtttctattagttaagtgcacgttgtaggttaggattttttaagctcgtagttgaagacttcaaattgttgtcccagaccgatttccaggttgtaccaagattttggccagaaatcgtcagtgaaccagcgagaaaacgaagttatgcttgggaagctgaattcgccgaagttgggatcaaagaagatgacacctttctgatcatccacataggccgctacagtatgtccagccatttttccgagaaaactaattttcttgtagcctgagcctttatcacccgtatccagaatagcgcgtaataggtctgttgtacctttgttaccggtttgaccgactaccttggatgagtgttcgtccacgtcgtttttttgcatgattggctgaatgccttgcgtaccaagccagtactctgtcatggtactttgttcatcatctagataactgtccatctgtaactgcttaatggaaactagtgagtcgatatgaaattttcccttttgtcccccgacatagagttggtcaaagatgctttcacccttggcatgggcgcttatccaatgagcagatatagactcgcagacaccgcctgaggtgtctttgtgtttcatgatttggtctaggaaggtccctttggtttgggcaaatttgaaggtgacttgccccccgtgtttactcgccgaatttcggactttacctaatctggttctgaccccgaaatgcatcattctgtccattatcatggcaggggagaatcgactttcttggtttttcatgccatcggtggttagctcccgatcgagcatagaatggcctggcaggttgcgttgcaaagtggtcgagaaacgttcccgtaaccctgctctttttctgttagtgtattgagaattaagttccaatggagtcgtggtatttatatcctccttatcatgttcgatagaatcccttaattgtattgggcatttttggggtttttctttttcactgtattcatgttccatatatattacctctaaattaatcttctaattgttgaatattagttctgatatttcaaaaaaatagtttttaaggcttggtttagcttgttttttatcaactttcagtgagagatcttatatttctcggttttttgcgttttggaaaaataaatgattctggcgatatattggcgtcactgtcatgtttatcgtattcgtacaccataattatcacctatgagtttttagtgagaagtgtttatcttgtggtctgttatattgataattgtactgtagctaagatgttaattgaatacggggtaattcaaccacatcatcataacgtttgcgttggttgatattatcgacctgagcggtaaaacgattattttcatctaccttgagagccggtaaaccaagacgatgggtaatgccgggtaaaaagtgatcaataccttcatgggattgcaaatgagcattaccataaatggcaacgaacttctctcccgcaggcaattgccgtaaacgttcaaccgccacgttattagctgcccctgcacgatacatcaggccatgttgtgttccttccacggtagggcgagttgtgctgttgttatctagtgcaatgattttcatctgcttgcttctggcttgttcaaacaaattcgcagataaatgtttagtcttaagcagtgcggccagttcagcaggcatgggttcatttccacttgccaggaatttatctatcaacggttgagctaaatctgagcgtaagtgttccagcccaatgactgtcacgccatgcgcttttaatacttccatctgctcttcgacaaaacgcaatccgttcagatctgagccatgactttcaccgatcagtagcccttgacgatctttaagtaaaagagataactggctgttcagatccacggtgttattcagttgatgattaaattgcgtcagcgcatctgaggcaaattgctgatcccaggcagtcacatcagtgtcatgagagctgtgatatattgcttctatttgtgccaatctactgtgttccagttgggccagataggtaggattagcaaaccggtggagcaaaatgtcctcttgcgatttagtagaacccggttcggcttgtttggcagcttctttaaggaaatagaccgccatttgcacgctttcaacgccagtcatatctaacagctcattatagctgtagccaagatggacctgtttattctgttcatcaagccgggtatgagtcagcaattccttactctgggcggtgtccaaccactttttaaagtcatcaaattgagcacctagctccacgtgaaacttaggttcaaaaggtagatcgttgggaatttttccttgatagccggttttagcagcaagatagggatcttcttttacccagcgtaccatcagatcggttagcccgggggtattgcctttgacctcttcacgagcaatctggtagatatgcgatgccatttcagggcgagtttccgccatttccaacaacgagtggcgtattttctgcaaagtaccggtaaacatcagatccccaaactgcgtttgtgtccttctcagggcagtattacgtttagaatcaggatgttcctctaggtaatgggtaatgcgtcgatgcaattcgaaacctgccgccaattgctcattcccacttaggtgatggagatgctcaagttcatccagaatttcctgataggagggaccaatccgtttggcaaaaaccgcagcctctttacgtaaattattgctggtgatgagatcgtggagtaatggattattttgagacaattctaatgcctgttcagatgatttttcattattattcaattgtatcgacggatttcttcttctttcgatggttttatcgtattcatataccatattatcacctgttaatttccgggaagagatatacccgtcatctttcaagttgcttctttgttggctgcactcactcaccccggtcacatagttatctatgctcccggggattcgctcccttgccgccgcgatgcatcttgaaatccattgggtatatgtttgagataaatactatatggattaactattgtcattttattttttaaaaataaagttaagtatattttaatatataagtaaagttattttataaaaaattttcaattggtgttgtaatgtgtttttttataaattaaaggttttaaattcctattaattgatcatatttatcttctgaaacaataataccaatgtcatttattctgacaacggcgcgatgactatttttccatgttgtaagaataccttttactctaggtaaataatccaaatggataataccagaaacttcaagtatgacgttttgattattttgtttttcattattttccttagtcggcttggttgccagattcattttcgcaagggcaaggcggacatcttctgtgccacctaaattggagcacaatttgttaaataaggcttggtctatttgcgaattatccagatttgatttttgatccacagaagtggagatttggctaacgggttttatgatatctttaatattttgtagttttactggtgcggtaattgaatataataaagaaaggcgagggcgattgccgagtgcttgccaaaagttacctaagctatttagattttcttgtggtggaatgactctggtatatgcgccaggaattttaggtaattgtcggttgttaaccagtgcatttaaaatagctgtcatgacgcgtgcagcttgattattgggctgactgtcaggattggaaccgtctcctgatggttggtttgaatgccagtaagtaattaaatagttataattaatatttacccacccagacaataatgagctagtaatagggttataactctttggctccgcagaacgtaattgtagatcttcatgtatatcataaagaaatacactgacggtaggtttagccggagttgagttaatttctggcagatcaaaacggatatcaatcatttggttagaggtgtttagatgttgagataaaatttcatgcaatgcggtattaactgcaataattgcattattaggatcaattatatttgtcatatcgactccaatcttattaaacgtttaaaaaaacaatcggccagttttattcaattcgagaataattgcccgttctatgtgtttattgtcaattttttcactattatcatttgcggctaatattgatgataataaagcaatattacggatatttgcacctgtcagatctgtctgtttagacaaatggtcaaaattaagctcatctgataaattcaattgcttaggccaaattgcttgccacatctgtttacgtaatatttcatcgggataagtaaaatgggtaataaaggtaaaacggcgattaaaagcactgtctaaatggctacgattattggtggctaaaatcactaatccgggataatcttccaatcgttgtaacaaataagaaacttcaatattggcatgtctgtcttgagcatctttggtttcactgcgtttaccaaataaggcgtcggcttcatcgaaaaacagcacgccggaatcggcttcggccagatcgaaaattcgggagatatttttttctgtttcaccaatgtatttattcaccacggtagagagatcgactttaatcagatcaacgccaagatatccggcaatcacttctgcggccatggtttttccggtacctgactcgccgtaaaatagggcgctaataccggtaccataacctattttctcttgaaaacccgtgtttaatacttggtttcggtaattaatagtggcaataatttctctcagttgttgagttaatccctctgaaacgaccaaatcattaaaactgcgcttgggtgttatccgttgagctaatttaccgaaattttgttgagcgcggaaatttaatgccttacgcaaatcgatctccttcaattggtcttccggttgccggagtatttgatattggcaggcttctttaagaattaatggtaatgtttccggtgtaaatgaaaaacgttggcataactgagtaagattaatttcccgatcagcattatttggcagattttctgtcagtatcgcttttttctctgccagtgtggctactggcatctcaatttgtaccattggtaagtgttgaatccatacgaatgaatctcccggttctaccagacaaactacacgtaatttggattgattcagcagggtggataatttgcttagccatatttgcttttcctctgcaagtaaagaaaaattgcggattaataagcaggcatcatgtagccgggcttcccgtattgcgtctgttaacaaacaaggtttagtgttggtattctcttcgtctggtagatgagctaaatcgacaattaaggtactgatattatgcaatgccataatattactgaccgctaattctctggcgctgtcctgttttcctttgaggatcaccagtgggcatatttcatctatttcatttaataatatcttgttaagtgaatgataaagggtttgcggataccaagtctgtgaggtagaagagtgccaataagcacaggttatcaggggaggtaaaataacccgttggtcggataaaaaatgccagacagcactgtgcgttaaaaattgcgtttgtaaccaaatgggttcctcatggttattaagccgtaatagatggtgattgattaatggtgtttgcggtagaaagctattttgcagtaattgccaatcattttggcgttggctaaataattcaattgccaaagcaaaactcggccactgttttttactgttaccgtgcagaaaagcaaatagtgcatgataacgactgtcaaaatggggtaataaacctaataataaggtatcacgctcaaattcagtcagttcaaaacgttctattaataatgataatctaccggtgatgggtttattctctatgtccttataatcaataatatcactctgttttaaccaatgaggcatgcctaatggttttactaaacgttgttctatttcatcttcggtcagtaaaaaactctccggtaaggagtcgtaccaatctctcttttgataatagtagcgctgtaatagcagatcaatacgctccaaatggggataaatccaatctgattctactgccatacagtggttatttttcagaggaaagttcatataaaccttttaaatgttttgccagttgattaataaaggacgatccagccaaggtagtttggcgatatttaatggccatggccagtcagttaatagtgcatcaaacggttgttgttgaattgtgatgctgatttcctgtttatctattcgtaattttcctggccgttgtaaaaataactggcgggcatcattgcggcttaattttttccaggcaggaagttgagtgataaccgtatctagccattgttctgttgccaactgtttttctggttcaatgggtgctgactcaatattctcatcagccatgagtccacataaaataggatttaatcccttgtgttctattggtgccttttcagttccccaaatgagataatcaaggaagacaacggcactgaattgagcttgacgatggataaattcttgcttttcaagtagaccgagttgattaaacagagccggtaatatcggccataaaactaatattccagcattatttacctgacgtgaaggagagtattcaggcgataaaacgggttcagaagacacggatggttttttactcgatttatttttatccccgtgtttaggaataaagtattctgacagatattggtattcttcaaccgatagatattttttacagtattgtgaaacgggtgctgtttgccagagtggttttaaccaattatttaatggagaattacgggttgcagtctggtgaaatagcgtaataatagatgctatattaatcgctccgttattaagttcagtcgtgatacgtgagataatttttgcgtcggggtcaggtatttcttgtgcattatgttgttgtatatatctcaaagcattcagtattaattgccaggaggaaacgggttcctcctgatgctgcggtgtgattatgttttccgataacttgtgattaatgacaattaacaaagagggatctctgatagctagaagtttttttaaactatgctcagataaacagctttttgctaataagagtgtccagtttttttgtatatggggtaattgattaattaattgtttaatgttgatatcagtaatttcactattcttaatatcctctattttatttggtatggaatttttttgctgtaagtaatgaataaatttctcaatatcagtctgattatttacctgatattggtttaatgcttgacttaatctagcattaagtcgaataggaaacagtgaattaaaatcttgtaaatttatttcaccaaggttcagagtgagtgtttctaaatagatatttttgttaatgatatattggttgaaatgggagttgattaatttatttatattggattgattaagcagggagccatgtaatacttttttagctacctgcgtgttattagctgtgatagtaataataattcgatttaatagatttggttctgaaaccatattaatattctctttgtaatattaggcatcatatcataatccttatgaagctattatttcttcactgtatgcttctattgaagcagaaggtttctttcctagtgttaatgtttctagaattttatatgcgtgatcgcctaaaggagcaccattattttgccaaagtttataagtactggcaaattttttgaattcttccgatgatagccaatgaataacgagtgagatatgagtaggtaattcagctaaaatttcagttttcacccaagattctaatttgtaaaaatcagtagtaccgctcctaatgcgttctcgattcagtactatgctgactacaaatgaaaaatggtcagattggatatatctttttcctgagaagtaccagtaagagtgcgactcattgttttccaatggaaaatcatttatttgatctatgtttttttcaactaatattcgtttctctatgcgatcaaattcttttacctgcgttttaagttcataatcagggtcaaattttagtgttatttcatcatccgcttcgaatatatcaaaaggaaaactattgtaaggagtatcatcgggttgttttctgatagtaatccagagttcattttcatttgaggttgtatcggtagaaattaatttacatgtgcgttcctctccgtatatgtagtcatatcttgtgtaggacaagcaatagtgtgatatatattctcttggtggaaatttattttttgaatttatatcttttctaagtaatatccggttattagcactatcaagttgtacaatttgggttgtaagttcataatcggacttggttcttattgtgatttcatcattgttttcgatcatggcagggaaggagttttgatcattaagggtaatccatcgtctattttcggtttcttcttgactcttttcactgtcataaacgagttgataatccatatcttctatccacacggcgctattgcaccagtgcaggctattgcgctgcttaaatgcgttttgcaatttgtccagattgtttcttagatcattattgttattggtattaatagtgaatgtatctcctgtcacttcagtgatcattaggttcagaaatttggatatattgtagccttctctaaattccagattaataacttgaccttgcattaaatggcctgctgtatcagtttgtgtaatcatgacttgatcatttttaatttctagattatcaggtgtttggtcattattgaatttttcattaggttttattggtaagagttgacgatgttcaattaaataaaaagggagtttatccagttctggtgtttctttgaaacactctcctcccagacccaatcgggcagcaatgcgtttttgcagtgctgacactttatcaatacgaatattattacgttgataggctaaactaggttgttgagaaagatattcgcgctgagtagatagaaaatcttcctgagaatttgagtcttgtgatagaagaggggttgcacattgcgcaccaaaatatcgcaatagataatctagtattaccaactctttagtatagtttttatcattattattgattttagcttcattattcatttgattaattaaatgaggttttatgttttgatgaacattttgagcgacagtattttctttaaaaggccattgagcaccatgtacagtatctcctcgttgtttaaaagccaatagttttggtaataaggcgagatcggcacagttattagcgagagtttgttcaaaaggtaacataaactgatgtaattgtatttgctgttgggtattagtttgtaatccatagcaagcgggtaatttatttcttattggatagtaatccaggatcttacgatatttaccccaatccagtaattcaggttgtgtctcaatcagtggctctacaatgagcttttcctctacatcttgtttggaaacaataattttaacgccacctttggctgtaatggtgagtgggctatttggtgaggtgatcgattgtaagggatcgttgccccatagtctgggatagtacccatgaacgattgtccaggaccaattatcatttggtagtttagcaattctttcattatgcccatctaacgtgaatcgggtaactttcttgactcctttgattctcagtaattggttaactaagggacttaaatttagttctttagatttggtgtaatctttaattgaaggcaattgggggatccaaccatgacgtaaataggggccattaaaaatttcttcattactgtaacccatttctttcatcgcttgggtggtataacgtaacggtttttcaagaaccatttgttctgccgttgtataaactttagcgaatatatcagtgatatctttaacgtcatcatcaagttgaatatcaatcttcaatggtagatcgatgggttccagccaaataattttactgactgactctcccaaattgcgattgtccctcagaaaattttccaactttttttgagcttgaattttattatcttgaattttttcagtttcccggctagggagcaaataaagccaatagtttcccctcagtgttaattttaactgtgttgaattgttatatcggtttttaataatgaaactgtattgccgttcttgttggttataccagtatgtatagcgttgattctcaggctcacgaataagctgggcatcattaaagaaaaaatagccatcatttttgtcgttgctatgcaaatccaataaagctcggcgataatcttcttcagtgatggggccacaagttaatatttgttgtgggccaaactctttagggaaaataccgtctctggatgtttgttcctcttgtgtaggagtaagaagatctttcagtggtaatgaatggcggtaagctaaatcagatgcgccataacaacaagcttctaataaggtgatacccggatcattttcccccatatcgttccaacattggccggattgttgctcaataacggtttttgcctgggcaagtaaagtctcaaaggcaatatcatctttaacaatgggaaatagcatatttcgattattcatttgtgaactccttcgtttagggtttttatttccagactaaaatcaatacttcgtcatcgtcggcttctacacttttacctatgacatcagtggatggactgcctttttttaaagtcaaactagtgacccgttcaacccaaggtgattgttgaatcgtggctaataactggtaatagtcaatgcgattacctggtgttacgccaatagccgtattttctccccacggcatgtagattcgactcagctcctgttgtaattgatggcggccgtaatcgggattaactcctgaagcaaatatcaattcatagctaatcgggacatcaacgtatgtgggattattaatttcaatggttgtccaggggctgcttaatcgatctaaccattcgaccatttcagttaatcgggcttggttcaattctgggcggagtgaatcaccattatctttgtagcgattatcagggatgacgattaatttgcgcttttctggcgcgggtattttggttaattcattggtagaaggatatttgacatcaaatatgctgataaaccgctcttttagtaaggtgacaatatcgccccaatttaatgctcggttacgatgggacagccgggcgggaacccgtttcaggaaggtttgctcgtcttcttttggacgactattccaagatgcccaaggttgcgccacttcactgattgcaacggatgagttcaccggctgtttaatgctgttggcggctaatccgcggataaagtaatcttgttcgacggtcactgtgttgattaacgtggctgttgtggcgttatacaacaatcctttaattcttggataatctggagggactatttttacctgttttttctcctgttctatttgtgctttcagccaatatcgccctgatggcatttgagaggtttggtttgaagcatcctggggtaataggatactttgatcttctgattcaaatagattatctgtttggttgtaagttgatctatttaataatttccaggtatttttttgactcagataaaaccaagacaaagagagatctttcaggccctttagttgccaatagagagagaaagtttgtcccggtgctatatcggtaaaacctaaatagaatgtatcgtgagttaatgctgttatattttctccggcttggtctttgccaaaaggcgtgagaggataaatggagaattgttgatggaaagctgtcgcactgaattccacctgtaattcactgagttgtggggtgtagggttgttttttacctgtaggacgttgctggtattgagcgtgcataaagtcttgctcagcgagttttatttttatactcattgtctcatggttgtttgaatagaagtaatacttatcaggtaaggtaaaagtcaggctttttccttgtggtgcattttcgccatcaaataatgacagaatttcatcaagttttttctcttctctatagggagtgacaagatagccttccactttaaatacattattattggtaggtttattagcatatcctttataccacgatgaaaagttctctgtgggtaagttgacccattgaggggtaatagtgaatgttgtgtttgatacatattcggaattaacccattcagggagcactaccttcggactaaaactggagtccagtgatggcgattgaccaaaagggaaacgagtgatttttgcttctgaattgtcggaagcagagagcacgatgttgctgttaatacatatcttataaatccagggtaaagtgaaatcttgagtggttgtcagttttaacaatggcgtatcgaacgtcatattatccaaagcatcaggggggctgatgggatcattgttatcatcgtctggtaattgcaacttaatactatcagtgtcactgagatattcgactgacagtgttaaccagtgattccctgaacttattttagcggctatgttctcagaattaccttcccatttacttcccaaaattaatgtaatgttgagccctttttttaggaatgtgaataaaggccaagtaattagatagccggatagcaccgggatatcattagatgttggactaaaaatctgaataccgtttgttggtaatttcatgttatttgaaaggcgaagaggtgttgcagatttccagccatcgttatctttccgattccaatacaggtcggtcagtattgcttgacttgtctgtaaaatttgtgctttcaaccagtgccgtccctttggcatttgagatgcttggtttgaagcatcatggggtaataaagtactcaatcctccgcggttaaataggttgcgggtttggtcgtgcactaaattatctaatggactccaggtattttcttgattgagatagaaccaggataacaagcgttctttaataccgtctaactgccagtacagagataaagtttgccccggtaatacatcagtaaaacctaagtaaaatgtgttactgattaatgggagtgtttctgcgtttgctttgtcccaaccaaaaggagttaggggataaacggaatattgtccagttttgatttctgcactgaattcaattttcaatgaactgatctgaggagtatagggttgatttttatccgtaggattttgccaatactgagaatgcataaaatcctgttcagctaattctatacgaataaacgctggccagtcatttggcgattgactgtctgcaataggataattcattgctggcaaaggaaaactcaggctttttccttgtggtttattcgttccatcaaataatggttgagcctcaatttctttttgagtactagcctcttttagtttgtttttttcctgaggtgtgactaaataccccgttactttgaatgcattattttcgggttcaggattatatcctttataccaatttttaaagcctgttattggcaatcccacccattgaggggtaattgtcactgttgcattttcagtgccataccattcaggagcaatcagattgaaaccggagcctggcaacggtgattgaccaaagggaaaactagtggcacctgttttttcaatactaccatcagaggaataacgtacattactgttgccgctaatgctaatttcaatatccgtaatcttgggtagtataggcccctgaacggtgcccagctttaataccggtacattaaactccatattatctaaggcgtcagggggactgatggactcatcgttggctgataagcttaatatgagtttaagattgctccctgctttttctactaatagtgaaagccaatgttttccagaactgatctgagcagtaatgttgttaggattacccatccactcatttgctagagttactctaatactacgtactcctttcgacatagcaaataaagacgaagtaattaaataaccggacaaaactggaacatcattaggagttgggctaaaaagtcgaataccgttttcaggtaattcaatattatctgagtcgcttaatagtattgctgatttccagctatcgttatctttccgataccaacgtagatcggtgagttttccctgattcgccagtaaatcagcatctgatgcatattgtaatgggtttccagcgctatcttgcccggcatcaaacagggttcctttagggataagatattctgcattatctggatttaaggtaatgcctaaagcaacgttatccgcttgggcatttctgggttttaaacctaataattcccgataataaagatcacgatgtcgtgccggaaaagtattaaataaaactttggttgtttctaacagttttaaaaaagctaatataaaagcttgatgagccggtaaatgtccatccgctttattaatgttttggtaaatatccgctaatttttcaggagtattttcctgaataaagtagaaactgtcccagaatttatttctatcttgatcaaaagggatttttgccgcatattctttaagccagtttaaaatatccagtgtacttctttcatcaagtttaaagtctgtctctggtacgatagcggcgagtttattttttaattcggtaagtcccatattataccacctgttatttgaatatattgctgatagctttgtacaataggatggttatttaataatgaattttaaggcgttatttatccggcactgacagcatattggctggcaataaaacggccttttcccatactgggtgttgttatatccggtacgcctgacggattaatcgctggttgtgtcggggtaaaacgagcagtaaattgttgcccgacaataatcactgagtcagggctacagcaaaagtttacttgctggctggtatccaattgggcaatggtgactatacccataccgggtgttggatggctggaagtaatgtattgcgcttgaagttgtacctttttttcatcgcccacaatggcgatctttttgccctggatttgcgcgtgtccgctgcctttaataattgccggtcccaaaatggtgacctgccggttaccaaataatggctcaaatagcagactatcaccatcgacgatgagttgtttgctcatagactcacctttgcctgaccttcgttgatttcgagaatgctttcaagttgttgagtgattgcgctgcctcttaaagcataagtcacttgaatatgtaaggtattcggtgaatttgttttttgggttacctgaatatcgatgatttctgcgcggggttcatagcgtaatacgcgttcttcaatgcgggtttgaatctccgataacaattcatcactgatattttcaaacatataatcattcagaccacagccataatcttcacgcataatccgctcaccgggttcagttaaaaaaaggattttcatactttggcgaacattttcggctcctttggccatttctacgccagtctcaagagaaaactgtggcggaaatttccagccgcgaccataaatatcggctaatattttgtttgtcatttcaatacctcattactgtgttaagttaattttcgcgcctttaatatcgacgccagattttcccgtggccgacagagatttttccgcttgtatattaatttcttgggcttgggtgatgagatttttcgttgcattgagcgtaatatctttatcctgttgcagagaaactttattttctccgctattaagtgccacggtgttttctttgttatcgaatattaatgcctgttgtttatctccttgcttaatcactaaggttttcaccggatttttttcactgggttctaacggtggtttatttttcggattgtgcatggaacctaatatcaccggaaaacggggatcacattcaaagaatccgataattacttcatctcccggttctggataaaagcaaaatccactttcatgactggcataaggtttacctagccgggcaaaaaggacaccttgagtgaggtttaatgccggtattttgaccggaatacggcctagcgattggctatcttgctggtatttttccacgataccgatatgtaactctttcacttgtggcaccggaggttcgatatctggccgcatgcctaaagttaatcgagtgcgccagccttgcttctgattaattatctgatttatgccggtgataatcccttgaccatccattccttgaccaaagccatttaatgccagaatatcccccggttgataacggtgattaccttcgatttcaaaactaccggatatattatgactgcgtaagttatccataatgccttgagcaagatgtttggcttgttcattatccaatggatagctgtaagcccattgccactctttatcggccggtgcggcgatgctgtccacggccaatttatgactgccaagcttactgttttggctattgattgcttgagaaagcttttgttgagtaatatcccaggcacggatactcaccgttttagggctgtattggttattccactggagatccgcttcaaatagcacgatatcttgagcattattggtatgtcgatgaagggtatgtaccgttgatttattcagggccttgggtgttatcaaggtaaccgattcattgccgggcaacagccaggtgttagtggcggtcaatcggctttttagaaatgcccagtcattacaacgaaattgcaccatttgttcatgaacggttttgagttgtggtgcctgctttatcgtcgtttggatgccattctgattgaagagttttttgataattgcttcatcactctgtttattgaatagctgtgagtgaaagctatgggttaatttttgcaggtgatgttttgctgtcagggtaatgatgctgtcctgacctttaagccccagtgtctgccgaacgatgatccccttaaataacacggttttttgcatttgtacgataacttcatggttcgggcggcagcttgccaattcagcctgtgtcttggtgtcaaaaatagggttggcatcaccggcgatacccagagtgatgttggccgaagggataccattgatgtgatggttggttgtcaagctgattacggtgaattggttgagtgtcttaccacctattttgagggttactgtgggtattttcatgtatccccccgagcttgtagggtctgtccgggggtaaagtcatcaagattatccagaccgttttgccatgccaacgagagatagtcgatacccccggccagcgaagcgccagcacctaaggcgattaagggtaaggaaagcatgtcagtcacgctaaccgcagtggccggaggcgattttaactgtcgctcggtagcctgaataacaaagctttcgtctgccaccagagataaggtcgcactggcccgtaatggggtggcgtctcggtcaaataaggtgtagctgatggcaaggctactggcccggcaggcaaaataacccttgttttcccaacgcattttgccccatttgattttaagaaagtgaggtactttggtgctggcatcaaccgcacacagggatttcagcgttgcaagctgtgtttctattggtgtgttattgccgggcattgatgcatcaaacagcaggactaaggataatccggcgggctgagatagcacataacggctgctttggctggcacgattaacactttcatcctgttggtaacgggtttggtaatcaagctgaatggtatcggggttatacatcgcctgtaagctccccacggaaacttttccttcccggtctttgaaggcggaaagggtgagtctggataaaccacgttcaattaaactcataagcacctcctgtttcacgtaatgcttctaatacctcccgtttcaccatctcaattaaacgggcgttatccagtttttcctgagctaatgttcgaggggagagttgatcactcgtcggatcgatgacttttgtctgaataatcagttctttaatttctaccgtcatgcttttactcctaaccagcgcatatcctgataacgtaattccagagagttcaccagtacggtgttgctattagcatcgaagtcgctggtggaccagcgaacgggtagcgcgttactgactgtccagcttgctacgggcaatgaatgttcattcagtagcatgataacgacatcggcatacatcgctttctcaccacgcagaacacgatcaaatatcaaggtgagcggggtgatgatcatgacaccacgctctagcatcaggctgccatgttggatcttctcggctagccaaatatttctggcgttttctccaccttggctgtgttgggtggtttgtagttctcggctcaggcccgatatgcgctgaaaggcgatatcaagtgggctgggaatgctgttaaacagaaaactggcgataaaacggtgcgatactgatggggtgtataagttgtgcatgtttttcccctgtttggattagttacggatatcaaacgtcagactcagctcaataaattccgccggaattaacagggccagcctgattttcatgatcatctttccggccaagatatcggtttcactcattgattcattaacacccagtaacacctcaaatgcttgatcttcctgagtgcctcgtaatccaccttttagccataattgacgtaaccagttgtgggcctgacctttaaatttcatccaggtgatggcgttgttggattcaaagacaaaggctcgaccgagttgggttatatgagtttcgatataggaaaccagacggcgaatttggatatagcgccagggggaacccggcgtgttgtccagcgtgcggcagccccagattttaatacctttgccggggaagctgcgaaccagattcaacgaagtgcctttttgattaagattaaggaggacacctgcttcaatgtaagagcgtaccgggctgatcactttggctaaagcaacattggcgggagcagtccacacccctttttgatggtcattgcgttgaatgacggcggcgatcgcagcagtaggtgaaagtacgatatgtttatcttcttcctgataggtacttttcagttttggccagtatacggccccccattggcgatcacttgaggaaaaatcagccagacaatcagcagctagtgttggatcgtccggggcatccagtaaccccatgattccgcgccgacttttacaaagttcaagtattgattgccatgcttgttgccaaaggcttttttgagtgtcgggatcattaaaacgggtagtgtcaggcacaacaatcaatgtgatttcactttctgcggcaatggcttgttttacccatgcttgttgtagggtggtgatcaatagttggaaatgggttgatgattgataatcacccaatgacagtgcataggcttgttgtccgccgttttcaaagaagtgacgcacggagtagtacattaatcctgattcaccaaatgcttgggtaaattcggtcaggctgtttagtttgacagcggttttattgcttgggttttcttgggtataaccaatgaaaacggggacaccgataaattcattgtttggtggcagggatatacggctttccgttatcgtgacgcccggctgttttgtctctgttgtcattatcatctcctcaatgattgaatagacgcggtgttaaaccgcgccttaataaggttactgtgctacgtattgtgaaaattgaaggataataaattcagccggacgcactgcggccatacccactttgacgatcattttgccttgctgaatgtcagtgtcggacatggtgatacctttaccgatctggacaaagtaggcttcctgcggtttatttcccgctagggcaccttgttgccaaagttgatagaggtagttgtcaatggctgcttgtactcgtttccaggtgggttggctgttaggctcaaagacggcaaatcgcattgcccgcttgatgtctcgttccgctgcattaaataaacgtcgtactggaatgtagcgccagttgtctgttttatctaacgtacgggccccccaaattagcgtacctttgccgctaaaagcacggatggcattaataccggcttcattcatggtaccttgcttatcatctgtgatcggctcggatggtttggcattattcaatgccacattagcgggggctttccagacgccacgactggcatcggtcgccgcataaatacccgcaacagcggcgcttgggggtaaggtaattttagtggactttaatttgtcatcgacggcttttttagctttagtgtattcccctagagaagccgttttcagcttggctagagtttcaacaccgccatagccatctagcataatatcagcatctgctggttggctataagtaaaagaggtctctagattagggtaatagacagcggttttatccggttgagtagtgggtttattttccccatctgtactatcagcgagtaggaagtaacctactttttgctgtaataaggagtttactgcaccgtagaccttttgttttagtgttacatctgtttcagggcagaccaataaggtgatctcttgttgtttttcaatcaggtctggcagctttgctaattctgattcatctgtcgttatcaatggcaacagataacagactccaccaccatgactaaaatagtgctgtacagcaaaggcactgagagaagtggctgtgacggtagcggcgtaggtataggtttttgcggcatttccacccacatttgtagcctttactgatacggccggtgaaagtgaaaattgtgagataaaatccaaccaactggtgattctaatacagcttccctttgcaggttgattcccgtctttgtcaaaaaatttaccaataaagacgggaatggcggttggactattgctaattgatagcgatagtgaagcgtcctcttcaatataaacgcccggtgtggcataggttgcggaagtcatggggttttccttaaataggataagtatgtggtgatcttgaatcgattattcgccccattaagattgggcaacattttgggtaaattgcagaataataaattcagcaggacgaaccgcggccataccgactttgacaatcattctgccctgtttgatatcgtcatcggtcatggttatccctttaccgatttgaacaaagtaagcctgttccgctttgttaccggctaatcccccttgttgccagagggcataaagatagttatcgatcgcacgatgtaccgctttccaagtgggttgactgttaggttcgaataccgcgaaactcatggcatttttaatatctcgctctgcactattaaataggcggcgaaccgggatataacgccagttatcactatcatcaagtgtgcgagcgccccagacggtgacaccggtatttggaaattcacggatcatattgatggctttaccggtgttataggtaccttgcaaatcatcagtgactttaaatttcggtttcaccccgctttgtaatacaacatttgccggtgctttccagacacctcggctgttatcgacactggaataaataccggccatcacggcgctaggtggaatatcaacgctggctttattttctccccattcagcggtcagccaagggtaataaacggcggcaaaagggcttagctcataatcattttgggatgagccattagaatttaactctgtggttggaccatccagaatggcgaataatcctttgcccgattggcaaagtgtacttaccgcatttttgatatcttctccggcagcaaccagtaaggtgacatcatccagttttggaatttggtttgctaagtcgttggttttgacaagatagccatatccaccgccgttaataaaataggcacgcagtgaaatatcaagtttgtcgttagaattaaattgcccgctttttagtgtcaaatattccaaccaactattaattcggataaaaggatgttttgataataatgaattgctatttgcaaccgcaaaaacaggcactgccgttacactggaacgaacggagagtgatagtgaggcgtcctcttcaatataaacgccgggatgggttggtgttattggcatatattgcctccaattattgagcgatattttgcatgaatggtagaatgatgaattcagccgttattctggcgttttaggcggcctgaatcattactctatccgcagtgagttttatctcttgaactgcgatatcattgctggtggcatcaaaagaaggggaggttaatgacgttgggaacgcatttgccacgctccagctcattaaaatttcggtgccggcttcattggtcaggctaattgaaacatcttttttctcaacctgattaagctgaatggaattaagccagtcaaaaagtttagtatccccagggaatacccctttacgcagcgtaatattgatcaactgacgttggcccggcattttatagtgattaccggtaccatctttatattctattacatcataagtgatatctagccctgaaacgttgttgaaagggatttgttcatcaccaacggagacaacgaatcgataagttggtattggataatcaacagcaatttgttctgtagttacggacatagtttatttccttaggttggtaggtcagtgcggttatcgctttatttctcttggcatttagcgatagacaatagctaccgcactaacctgtttatataggaatgttactcggtgaatttaagatcacatgatgatcactttggattatagttaactcacgttattttcaaacatcaattattaatatttaaaattatcaatcaatgaaattatttaaatataaatcatttcataatcacattgttatatttttctatgaaaggatgaataaatagtgtgttataaattttgatatataaatgatgatgcgtttcagaaaagagttttattaacagaaggttatgtatgctttttttatcggatttaatttgtcagattattgtattttaataatgaggtatgggcaattaggttatcaatctgaatcaaattcttggcgttcaatctattgacaggtttcgtcctttttaaaacaaactacagcgattaagctgtagtttgacgcagaaaaggttcgattaagggaaatcaggccgtagggcgggcgacaatattacgcgtttccattctgacttcatcaatacgaacatcaataatatcgttcaattggtaagcgacttcacctttgataatcacagtaccggtctcttggctacattgcagttcatcacgcacggcatgcaggaagggtgctggtataaaggccactgcaccgttatcggccagtcggacacgtaaaccaccacgggtgatatcaatgatttctgcggtaaatcgttgttcggttcctgcgtgtggttgcaggaaccgggcatatagccaatcccccacatcacgttcggccatacgattcagtctgcgacgttcagccagttgtaaacaggtttcttctgagggctgttctacatcggttttttgaataatcgctttcagtaaacgatggttaatcatgtcgctgtatttacggatcggtgatgtccaggtggcgtaagcatcaaaaccgagaccaaaatgaggaccgggttcaggtttaatttctgcgaaagtctggaaacgacgaatgcgactatcaaggaattgtgttggttttttatccaattcacggcgtaatttacaaaagccatccagagtcaataattcttctgttttggcatcaatatcattttcttgcagtaattcaaccacttgttcgatttgcagtggctcaaaacccatatggacattgtaaataccaaagcctaacttatcgcgcaggatttttgcggcgcacaggttagaagtgatcatggcttcttcaacaatacggttggctgtacggcgttgttctaccacgatatccagtacgtaaccattctcatcgaggatgaagcgataatcaggacgatctttgaaaataagcgcattttggtggcgccattggttacggcgatcactcatttccttcaaaagcgtgatttgagtcttaatcgcttcggaagcgggttcccaagtcccggttttttccagccagtcagaaacttcgtcgtaaaccaatttagcttttgattcaacccaggtagagaaaaacgcaatatcatcacctagttgaccatcttccagaatagaaacctgacaaactaatgccggccggcgggcgttaggacgcagagagcataaattctctgacaggtcgcgtggcaacatggggatattaaaacccggcaggtagttagtgaaagcacgttgatgggcgatttgatccagctcgctgccagccgcaatataagcggttggatcagcaatggcgatactgagtttcaggctaccgtcatcttgcttagcaatatgcaaagcatcgtccatatcttctgtggttgcactgtcaatagtgacaaaatccagcgacgttaagtcaatacgctcaagatcgccatcgttcatctggcaatcggcagtcatcgcgggagcatcacgttccagattatggcgcgtgagtgttacccaccaaggggcgtagtgattgtcgctttcagtgatatagccggtaatttctgcatgaaaaccccggctgcctttcaatggatgatgacgcatttcagcgacggcccaatcaccatgctgaaatggatgagtgacctgattggtcggccggcaagggatagcatcttttagcagtgggtgatcaggagtgatccataaacggttgtcattttcttttttctggatacgaccgacgaagcgatttagaaatggttcaatcaatgtttctggctcggcgatctctctttctttatcagtatgaatagcggcagtcactcgatcgccatgcataacttttttcatgtgtgggggaggaatgaaataacttttttgcccatcgacttctaagaatccgaatcctttttcggtacctttgaccaaaccttctactcgaagtgtttgggaatgaagttgctgttttagctgtgcaagcagcgggttgttttgaaacataatatccgcggagaaagttgagggttattatcagatagttttttggaataacagttttacgcgaattgatggtgtcgagcaagcaacatctgcaaaatagcgtaaaacagtacgggaattgcaatgaaaattacaatagttactcagggtaaattttttctttaaattcacatagatcttcaataatacaggaaccacaacgaggtttacgggctatgcaggtataacgaccgtgcaaaataagccaatgatgacaatcaactttaaattcggccgggacaacttgcagtaatttattttcgacttcattgacatttttaccgggcgcgaattgagtacgattacaaacacgaaaaatatgggtatcgactgcaatagtcggccagccgaaagcggtatttaacaccacattggcggtcttgcggccaacacctggcaatgcctccaatgcagcacgatcttcgggaacttcgccagcatgtttttccagtaatatctggcaggttttaatggtattttccgctttggtgttatacagaccgatagtttttatatactctttcagcccatctacccccagatttagaattgcctgaggcgtatttgctactggatagagtttcgcagtggctttattaacactgacatctgttgcttgcgctgaaagcagtactgaaataagtaactcaaatggtgttgtgaaaactaattcagtggttggctttgggttgttatcccgtaaacgcgttaaaatttcgatacgtttctgcttgttcatatcaaatagaactctccgattctggtgacattgttattgcacggcttttttcttttattgctctcgttttcattttttcatcaataagatatttcactgccagcattaatcccaaaccgataaaagcgccgggtggtaagatggctaataggaaaggggaatccatatgaacgatttctattcgtaataccttagcccaattgcccagcagtaaatcagcgccatcaaatagggttccattgccgagaatttctctaatagcaccaagaacaaacagagcaaaagtggctcctaatcccattgctaagccatcaatcgcagagggcatgatcggatttttcgcggcataggcttcagcacggccgataacaatacagttagtcacaatcagtggaatgaaaatccccaatgattcatacagaccaaaagcgtaggcgttaatcaacatctggacagtactgacaaccgaagcgattatcataacataaatgggaatacggatctcattgggtacccaacgacgcaagctggaaaccgcaatgttggtacagactagaaccagtgtcgttgccagccctaagccgagcgcattggttgcagtggaagagacggctaacagggggcacaatcctagcagttgtactaaagcggaattgtttttccatagcccttggataaataaatttttggtttcactcatgatttttctccacaggattctagagaagagagatgttcaggtatggtctgtaaataaagtgcagtccgtttgactgagtttaccacggcgcgtggggtaatagtggcaccggtaaattgatcaaactcaccgccatcttttttcactgcccagtgctggtcatgatttgatgtgatggttttccctgaaaatacattaatccagtttgaaatccgggtttcaattttatcccctagccctggggtttcatgatgttctgtaacccgtacaccaagcacttttcctgagaaatctgcgccaaccagtaattggatagcaccggaataaccatccggtgcagtactttctagcgctgccgccacggggtgaccatttttacgggccagatagagacgatgaggcaagttattgcccagagcattcgcattaactagataacattcgttttgtatatcattgtcgtacagggcaggcggaataacctgatcaagcagcgacttgtgctgtagggcggcttgttctgcaatagtacttttggtgagtgaattcacgacagccgttagcccggtggtaagtgccgcaaaaatggcgagtgtgatgccgtgacgtcgcatggtttctaacataacggctccttatttatgcccgtaaacgcggggttgggtgtaatggtcaatgagtggcacggtgatattcgccaataagaccgcaaatgctatggcatcagggtaaccaccataaacacggataacccagactaacaggccaatcatggcaccaaaaaccaaacgacctttgggtgttgtggaagcactgacgggatcggttgcaataaagaatgcgcctagcatggttgcaccggaaaacagttgtaataatggcggcgaataacgggatggatcaatcaaccagctagtgagtgcacataaacctaataccaggataaatgccacaggaatttgccaggttatcacttttctgttcagtagaatcagcccaccaacaagataagcaatgttgacccattgccagccgatgccagccagagatccttgtaatataggttggtgaagaacgtcatcaatatggtgagtcaataaaccggttttgaaactatccagcggtgtagcttggctgatcccatcgaaaccttgttgcaattgctgcaatgttgttccatcgggagtctgaccggtgaagatcaccatcagactgtctagcggagtgatttgtgttgccagtaaatccatcggcggcaaccagccggtcatttgcactgggaatgatattagcagtacgacataaccgaccattgccggattgaatgggttttgaccaaggccaccatataaatgtttggcaataatcaccgcaaaagcagttcccaatacaatcagccaccaaggagccagcggtggaaggctgatccctaaaagtaaacctgtcagtaatgcagaattatcctgcaaacgaggcataattgcctgtttacgcagagatagggcaaatgattctgcaagcaaggcggtaatcactgcaagcaggagctggaacaaggtaccgtaactaaagaagtaagtttgtaccgcaataccggggattgctgccagcacaacccacagcataatgcggctggtactttgctgattgtgtgtaaaaggcgaacttgcgacttttagttttttattgtcagtctgaacgggtctgaatttcatttataacaatcactattctattgaaattttctgttgttcctgagcgtcttttttggccttaaccctagcaatagcggcagcgacagcagctttacgcggatcggtttcttccgctggcggtgtttctacctgggtttcagctaattgctctgtttgggcttttttggctttgacacgggcaatagcagctgcgacggcagctttacgtggatcagtttcttccgctggcggtgtttctgcctgagtttcagttaattgttgagtctgagctttcttggctttgacacgggcaatggcagccgcgacagcagctttacgcggatcggtttcttccgctggcggtgtttctgcctgagtttcagttaattgttgagtctgagctttcttggctttgacacgggcaatggcagccgcgacagcagctttacgcggatcggtttcttccgctggcggtgtttctgcctgagtttcagttaatggctgtgtttgggcttttttggctttaacacgggcaatggcagccgcgacagcagctttacgtggatcagtttcttccgctggcggtgtttctgcctgagtttcagttaatggctgtgtttgggcttttttggctttaacacgggcaatagcagccgcgacggcagctttacgtggatcagtttcttccgctggcggtgtttctgcctgagtttcagttaatggttgagtctgcgcttttttggctttgacacgggcaatagcggcagcgacggcatctttatgaagatcttgtttttcactagtagtagtttctggttctctcgcttccggtgatggtgtttctgactgattttgagctgctttcttcgctttagctctggcaattgctgctgctaatgcggctttgcgtggatcttctgcacttgttggttcagatggagtaatactcatattttccaccgcctgtttttccgcctgacgagcgcgaagctgctcttttcttgcctgacgagccgctattactgcggcattatcaggtagttgccccggttctatagcaacaactttacccgcgttagcctgtttttccttcacgcgggaaagcgcatcttgcacagcgctcttatctttattatcaacttgaacggccgattttttgtgtcgttcatctcgggccagtttttctcgttccatacgggcctgcttagcttcgaaacgaattttggcttcggttgaacggcggttttcctgatccaaggcccgaatttcggctttctcttggcgataatattgcaccagaggaatattgcttgggcagacataggcacaggcaccgcattcaatacagtcgaacagattgtgatctctggctttttcgtgctcttgcccacgactgaaccaatagagctgctgcggcaataaacgggcagggcaggcttccacacataatccacaacggatacaagcctcttccgttgtatttgaatccatttcctgatgggatggtgccagaatacagttactgatcttaacgatgggcacgttgaggtcaggcagcgtgaatcccattaagggaccacccataatgaccatctgttctgattgtggtgcaaaaccggctaactggagaagaaattgtaccggagtaccaagccgcgcccaaaagttacccggcgaggtgactgcttcgccggtaattgtgacgacgcgctcaattaaaggttctccatcaataatggcccgtttgattgcaaccactgtccccacgttctgcatcagtacaccgatagtagaggaacggccaccggaggggacttctttaccggtcagtatcttagtcagttgtttggcaccgccggaaggatatttggttgggataactcggacgataatcgatttatcgccctttagaacggttttgagtttttttatggctgctggtttattatcttcaataccaatcaggatctgctccggtttaagcagatgttccagaatacgaatgccctcaataagttcgttggcatgctcctgcatcaggcggtcatcagcggtgatataaggttcacattctgcggcattaatgatcagtgtcttaagaccatgacggccgctttgtagtttggctgcggtaggaaagccagctccacctaaacctgcgataccggcctgatggattcggttaagaatcgtatctgcatccagtgattgataatcaggtgtttgaatgcgttcaccccattgatctttcccatcagggcgcaaacgaacgcataactctttcaacccggatgggtgcgcggtaatacatggttcaatggcaatgatggttccggaagttgatgcatgaaccggtacggtacgacccgtgccaaatgttaagggctggcctttaagcacttcatcacccactttgaccagcaactcgccttccgtccccaaatgttgttgcaatgggatgattaactcttccggtagtggcgtaatgcgtaaagggctttggctggattgcagcttcatttcaggtggatgaataccgccggcgaaatcccagattttatttttattgagcaaattgaataaattaaacatggtgttcagcctcaatatttttgatcgggatacttttaatggaaatggcgtgagatggctgaacaggaatatttctaactggaatggtttttaaatcccatttccagttggaagtggttgttgctacagggatcatcgtaatacagtcggttggacaaggagcaacgcacaggtcacaaccagtacataaatcttcaacaatggtatgcatggcgcgggtagcaccgacgatagcgtctacaggacatgcttggatacatttagtgcaaccaatgcaattctcttcatcaataaaggcgactttgcgtgcagggttttgtaggtttgcatcaccatccaatggttgcggatcgataccgagcagctctgaaattttcagcatgacttgctcaccacccggtgcacatttgttaatcatctcgccattgttcgctacggcttcagcataagggcgacagcctgggtaaccgcattgtccacactggctttgcggcagaatatcatcaatgttttcaacaatggggtcctcttccacctgaaaccggcgggcagcaaaccctaggattaacccaaaaattaaccctagtgcactgagtgcaccaatagcaatccataacgatgtcatcagaatttcaccaaaccactaaagcccataaaagccaaggacattaaacccgcagtaataagaccaatagatgaccccttgaaaggggcgggtacatcagcaacagccagacgttcgcgaatagcggcaaacagtaccataacgagagagaaaccggcggcagcaccgaaaccatagatagcggattgtaaaaaatcgtgtgattgattgatattcagcagcgccacacccagtacagcacagttcgtcgtaatcaacggcaagaaaatacctaataaccggtataacgtcgggctggttttgcgtacaacaagctctgtgaattgcactacgaccgcaatgacaagaataaagctcagagtacgcaaatagattaagtccagtggtaatagaataaaagtattcaccagccatgaacatacagaggctagtgtcataacaaatgttgtcgcaaatcccatcccgatggcagtttccagctttttagatacgcccatgaaagggcataagccgaggaatttcaccaagacgaaattgttaaccaatacggttccgacaaataaaagaaaatagtcagtcattagctgtgcctgaaaatgagtttgtttactttttattaaattgtttactttttattaaattatcagtatgccctcgttttaccagggcaatctattgttaatgataacaaccaaagaaagttgaggttatcgatcttgtgtgaaagtcattttgactcgatgagagcgtttaatgtaggggacaaaaatagcggctgccaatagtggccatgctaatgcacgcaaagccatttgatcgggaataggggagaaagcgaaagttttcaatgcaattaatacggtaacaataagccaaataataaaaatgtggggaaatttttttgatcgaatgaaaagcagtttcaatacccatagggtgaaacaccacattaccgcagtaatggcgacagaaagaaaccacattaaagtaaagtgattattccctgcgctcaacatattgttttgactgaaaaatgtcataatatatagagcgagcattacactggcactgagaaaggtcataatcagataagctgccggagccagaacccaaccattaattcggtgataatcattggtttgatacataaatcattccatttgaagctatatgaaaaaagaataataggcgattcggatgggttaggaaatagattgattgaaaaatcttcaagggtagattcagagataatttgcgaaatggtcatcaccgatgatattttttacggatgctgaattgctgcatattattaatgagtttgagaggctgttatgcgtgagctgttaaaggttgggttggtggggtatggttatgcgagtaaaacgttccatgcaccattaattgctggcactgctggtgttaaattggccgctatttccagtagtgatgctgagaaagtgaaatcagattggccaaatatcccggtggtatcccgccctgaggatctttttaatgatcctgacattgatttaatcgttattccgacacctaatgatacgcattatcctctggcacagaaggcattggcagcgggtaagcatgtggtggtggataaaccatttactatcacagttgaacaagctgaatctttaaaacagcaggcagagaaggcggatttattactttctgtatttcataaccggcgttgggattctggttttctaacgataaaatcgttaattaaagagaatcgtctaggtaaattaaaatattttgcatctcattttgatcgttatcgcccgattatccgtcaaagatggcgtgaagcggcggggcaaggaagtggtatttggtatgatttaggccctcacttacttgatcaggcgattcaactgtttggtaaaccgcaatctattaccgctgatttgggaatgatccgtccacaagcggaagcggtagattatttccatgtactgctaaattatccagatatcaaagtagttcttcatgcaacaacactggcagcggctgaatctgctgtttataccttgcatggtatggcaggtagttacgtaaaatatggtcttgatcctcaggaagagcgattgaaagcgggggaaaggccgccacatgctgattggggatatgatattcgtgatggtattgtgacgctgtcacatggagaggaattagtgactaaacacgtgccgactctgcctggtaattattctgcttattatgcggctatccgtgatgcaattatgctcggtaaacctaatccagttacggcaaatgaagccattcaaattatgaaattaattgaggctggtattcagtcggcagaacaacaacgtacagtggcaatttaagcctatacccgtcatctttcaagttgcttctttgttggctgcactcgctcaccccggtcacatcgttatctatgctcccggggattcacttccttgccgtcgcgatgcatcttgaaatccatagggtatatattttgttgagactttttatttactacttagcctggcttgccgggcctattatttgaaatagcaaggaaaatgatcaatgacttggtggcaaaaattaaaaatagattcttttttgatgatattagtgacggtagttgttattgcgacattctttccttgtgagggggaaattaaagtctggtttcaacgattaaccacagcggctattgcgctgttattctttatgcatggtgctaaattatctcgtcaagccattattgccggcatggcacattggcggcttcatctggtggtctttctcagtacctttgttttattcccgattattggattagggttgaatttgctcgtaccggaaatcatgacatcaacagtttattggggatttctctatctttgtgcattaccggcaacggttcagtcagctattgcttttacctcagttgctggtggcaatgttgccgctgctatttgcagtgcttcggcgtccagtattctgggcgtatttttatcgccaatattagtcgggttgatgatccatacacaaggtgaaggcagcgctgatactctggaagccataaaagccataattctgcaattgatggttccctttattatcggacatctatcgcggccattgattgcccgttgggtagagaaacataaaaaactgcttaatatgactgaccggtcatcgattcttttggtggtttatgtggcttttagtgaggcggtggtagaaggtatttggcataagattgatggttattcactcctgacgattggggtggtttgctgtgttttattggcggttgtgttggttattaatacttatattgctcgttggttgggttttaataaagaagacgaaattacgattgttttttgtggttcgaagaagagtctggctaatggtgtgccaatggcaaatgttttattccctgcggcgacggttggcgtaatgttgttgccgttgatgatttttcatcaaattcagttgatggtgtgtgcagtattggcgcaacgttatgccaaaaggttaaaatagaaataggtataaatctatgatagggaattgttgtaaatatatgtttatacccgtcatctttcaagttgcttctttgttggctgcactcactcaccccgatcacatagttatctatgctcccggggattcgctcccttgccgccgcgatgcatcttgaaatccatagggtatatatattaatgatatttacaacaatgtaatatttgactacgaaatttaaatcgtaaacttctatttgaattttatatttccccaatgaatacaattttatattttaaatagttttctttagaagtctaaatctttgattaagatcactaaaatagtcgttatgatggattttttaaatctatacttaatttgttgtggtatatattggaacattgttaaattagacctagataaatctacgttaatattactcaaggtgatgatatgattattgttaaaaattcttcaaataaggtgactaaagtttcaattaataagtgggggaaagatggtaatacaggttattgggatattaatccgggagatacagcgagttggaatcgcactgatggtcgtggttttgtaatgtcaataatacgtgagaatgaggaccaaaagtcatattttgtcttagcaaatagcaacattgttatttatgataaagatgctactggttacggtaaaaatgttcaggataatggtcgttggatatatcctttaaattgaatcatgagaaaaaacttatcatttttattgtcatcctaaaatcatctcctagggaggtggtcttttacattcagcttagtattcaatttaactggatattatattccaaatatataaccacaatcaggaatagaatcttcacgcgaaacattgggtatgagttgtgctagtaagttgtaagcaaatcattagcctaactaaaattgattgtgactaatgggattgtacttttaaagttccgtactggatttgcgctatacgtatagtcaaacgatttttattatcaaagttagcaagaacacgacctaaagagacattttataacactctagagctattacgttttgctaaacagttcgataatcgtttagataacttctttgacattcatccagagtttgtatctaagatcgttattgtgagcgatagtcgttcatgtattgataaaattaaaaaacatctaatgtaacgtgaataaaactagttttataactctctctcaccatgtcacggcgtttactgcgccgcgtgtttcactcgcaaaatttcgacggtgcgcgcctcgtccagcacgcgataaaaaataatgtagttccgatgcgcgaccagctcgcgcacataatccggcaggccgggccgcccggtgcggccaagctccgggtgctgcgcaagcggcaaggtcttgtcgcgtagctcctgaccgaagctgcccgccctggtcgggttgtctttgcctatgtatcgaacaatggcgcgcaaatcctcgcgggccttcggtcgccactcgatgcggtaaggggtctttgccttcgccataaatcagccagccgcgctcaagcgcgcttccttttggcgggcttgtgttcggcggccaaggcggcaatatcggcgtccatctcggccataacctcatcgtgtgaaagattcgggcgcgggtcgtcgatagcatcctgaatctcggcggccagccactccgagtaggcggcggcttggtgggccttgcgcattgcctcggcccggccacgattgccggcggtttcttctttctcgtccgggttccactcactggcgtcgaactggccgatggtgatgcctacgccgcgcaacacgttcagggcggcaatggggttgccgaaacggcgcggctcttggctgcgggccttcgccagcacagcggcggcaccgctgcgggttgcgatctgcacaaggaaggttccgccttgccctttcagggtcacaccttccacgccgccggcatcgcttgcggcgcgtagctgctcaatggtcatgctttgcatgattaactccttatagggtgatgaaagtaacagggttgattgtgcatattttctaggaaacgcgcaagcacctagacaaatcggtggtactgaccttcgtctttctcggccgttctttaagagctggcttcaggctttttttccgactgctgcccggtcttcattgacggctttatgcagtgcgtcaaaataggtgccggggggcacagcacgttgttcactctttgatttgtgcggattgcaaggttgtcccatgccattattcttttcttacaaactgttttgattctatttttgatgtatattatcatcaatatgtgaatcaaggaggttatattatgcgaactactgtcacgattgatgatgcgttgtatgcacaggcactagaaatggccgatcctggcatggataaggctgatattttccgtgaagcggtgaaaacgtttgttcgggtgcaggcagcaaaaagactggcttcgctcggcagcacatcacctgatatgcagatagttccccgtcgccgggaggagccatccgcataatgactattttagtagatacgtccgtctggattgaccatttcaaaaacaggaatgacggattgatccagttgttaagccgggatctggttctgattcatccgatgatactggctgaaatagcctgtggtactcctctggcaccaagactgcgaacgcttggagatctggggctgttaccacagagtcatcaggccactatcatcgaggtaatggcattcattgaaaacgaaaagttgtacggcctcggatgtggtctggttgatattacattgctggcatcaaccttgataacaccaggggcaaggctttggacgctggataaacgacttgagaagttggctaaacgtcttaatgcgagttatcagccgattcattgacagaatttaaaccgctctggaaaccaccagaaaaccggccggttttctggtggttttctcattctcaggaagggtgggcgggcaaatcagtaatgtggtttgattctcagataaagtgatttggaacggcttttcattctcacgcaatgtggttcagaaaagggcatttattgcgcatcggggcaatcatcattgcgcgtcactacagctaggagctgggaaataccgcgcattgcgcactgtagatgtcagtttgtacaaaaaatagtcttcgtgggatattttgtgtgccgtgcaaaggctcggcctttgagaccatagatttttatgctctacaaaggaaatcgctgataagatttcttcaaaggcttagaccatctgattatgcttcaaatgatgggaaatgatgaaatcacacagctatgttcgtcagtcatggcgctgttctggtgttcctgctgtgtattttcctagtctactggcgcggggtagcactgctgccagcagtgggcctgctacgcttctgggataaaaagttatatatttatttaactttttagtgttgccgcctggtttatttccctgttggatgttatatttatatataacttttatggaggtgaaatatgcataccactcgtctgaagagagtcggcggttccgttatgctgaccgttccgccggcgctgctgaacgcactgtctctgggatcagataatgaagtcggcatggtcattgataatggtcggctgatagtggagccgcacaagcgcccacaatattcgcttgctgaactgctggcacagtgcgatccggatgccgaaatcagtgcagaagatcgtgaatggctggacgcgccagctgcaggccgggaggcaatctgatatggagagaggggaaatctggcttgtctcactcgaccctaccgcaggccatgagcagcagggaacgctgccggtgctgattgtcacgccagcggcctttaaccgcgtgacccgcctgcctgtagtggtacccgttaccagcggtggtaattttgtccgtaccgctggttttgcagtatcgctggacggtgccggtacacgtacaaccggcgttgtgcgctgcgatcagccgcgcacaattgacatgggcgcacggggcggaaagcggcttgagcgtgtgcctgcaaaaatcatggatgacgttctggcccgactgaccgtaattcttagttgaatcaataacgtgaatatgttgccggcattgcctgttcctgaatagctgcaatatactgtatgtataaacaatgttaggaggctaattttatggcgctggcgttagtttatcccctgccttctgatgaaggcgactcattacctttctttgccgagtccgttgcggccggtttcccaagcccggcagccggctatgaagctaatgaactcaaccagcctgcggaaatcagtaaattgcctcaaatagacgcgttaagagcaaaaggtatacctttatggataccgatcatcctatcggccacagcccgatcacaataggttccagttccggtgaatcaaggttgagccgacttaattggctattaaccttgggccggttgaatctgacggcatcaagcgcctcaaccaatggacggatctctccgaccgtggtcgtatcatcagcatgaataatcgcgtcaagcaatgccagtgtcttatcagtttcatcggctaacgtcgcgccgggcattctgtttccggccagacaaaaaggagacttcaggtgagaattttcgagaatcgtttcaatacggatatcgtgaagccagtgctcgaaaaagttgtactcgtaggtaaaacggtcaccggcatcaaattcaaagtcacccagcgtaattttgtaggggttatcaggaaatccgatcccgccggagtaggaaatgccgtaatttttgccctaaatacggaattgatgcagatgatcatcctgccatccctgcacgatctgaatgatatagtgcaaagccgctaaagaagtctcgcctgacaatctgaatcggtaccagaccattgggctgatacctcggagggctactttcacaatataagatttcatggggaggtgtctgatagaatgatgttcctttgctcattctatcgttgatttaacaccgtgcaccacagatttttatggtctcgataatcaggaatgggagattccattcctgagctatttatgtttaacgatttgctgctttcatgcgtaatgcctgtttttctgtatcactgataaaagcagtttccagcccatttatctgagcctgacgaatttgagcaatagataaacccgcggcaggggcggcaatttcatattcatggcggatgtcgatgccttcaacggctggatcatcggtattaatggaagcaagaatatctttttccaggaattgtttgagtggatggtccaataaagaattgacggtgctggtttgaaggtttgaggttaaacaggtttcaataccaatacggttttcaaccaaataatccatcaatacgggatcagtaatggcttttaccccatgaccaatacgcgtggctcctaattccctaatggcttgccaaatactttcagcgccagcggcttcgccggcatggatagttatatgccatccagcatcacgggctttggtaaaatgagattggaaaagatggccgggaaaacctaactcgtcacccgcgagatccaatgcagtaatatgttgctggtgagctagcaggctagttaattcctgagtacaggcttgttcaccaaaagttctgcttaaaattccaataagacggatgtcgatatcgttattttgacgggcagaacggataccatcaataattgcctcaacgaccccttcaaccggcaatttgtggttcatcgccatgtaataaggggaaaaacgtaattcagcatagtcgagcccagtattgatggcatcttcaacattttcaatagcaatacgacgacaagcgtccaaatcagctagtactgccactccccaatcaagtttttgtaaaaaactgactaagctcggttcattttcaataatttgtacgtgggggagtagtgattccagatcatttgctggaagctgaatattatgctggttggcaagatctaagatagtctccggccggatatttccatcgagatggcggtgtaaatctgtcagtgggagttttatgtcaatcacgttcaggtccttttttatataaaaatgccagtcacatgcgttgactggcaatttaacaaaacgtttatcggcgcgttttattgcgcaggttgcacagtaccttctgctttcacttttccactgtcgtgggtgtcgccttctggcactatttgttctggtgcttcatcatcagaagggtcggataaattgtattcagacatgaattgatgtaagggcattttcttaccattcatttctacattaccgtctgcatagttaaacttaatgctgatagcatctttatcaaccgtggcaattttaaacagttgtcctagttgttcaaactgttttatctgttgctcagcattatgttcagcctttgctttatccatgccattcattatcattgactgagtggaaaactcaatcatcataggtcttggtaatgtgacattcagagacatgttctgaattaaggtgcgaatagcttcctctgttttcattgaagacaagctacttttatcttttggtaagtccttcaaactcacttggtaattaatggtactttcacctttggtattcttccaggtcaatggatcaataccaaattgtggattgtttttcagcaaaataggcaggttagacaataccgcatcaataatagctgtatctgctgcatcggaagagatatcatcagaagagagtgatttggctgtggcatcattgtaagcttgagtaaacttacgcatggcttcaccatccagacgatcggcagtaattgcaaactgaccagaaccaaaatcaatatttttcagtttaaggccatccaaactataagtgatttttcctttcagattagtttcatcttcaccgatatttgaatctattttaacgccggaaagcatcatatcttcattgccgatgccttttaggctgatttgctgaattttgatgctttgatcgccaatatagatatcaaatttgccttttttattgtctaggtttaaatcaatacctttgacaaggaaattttcgtcatttttattgatggttaactggtcgctcttgattgccagtgatatctttttcagatcacggctgagatcggaagtcagtttggcaccggaaaaattgaatttagcaccatttttttcaaaatcgacaggaatgatatcaacatcagaaataacagaaccactataactgacacgggaatcagaagtgaacagcgattttcctttagtgatttcaaacaggggttttaaagattcattattttccagttcggaatgaacggaagccatactcggaattaaggttaattttttcacttgtgcaagtgggaaagggccgtgatcaatcacagatttaattgaaatttcttcaccgggtttgatttctgcgtttttaacgccgtctttaactgtcagaacaagacggacatcagaactgaacacgccacggcggaaatctttactctgtagcatcagacctgtttcagggaaggcttttttcatctcagcattggcgtgggaaatagattgatctatacgttgttcaatctgtttacctgtataccatgaagctccagtccaggctgctcccaaggcaacaataatgcctactgccactaacgattttttcataatgcaaatccgtccttttaatgcatattttgcaggtaatatgcattctctcgatataaaaatggccgttaacacagcttggagtgtaagtagtgcttaacagcgcctgtgaataagttttaggcccaggttggtattattaattaaaaacccgggcggtaaaaccatcaccgtgaattatcacagccttttcggcagcagatatgaatactgactcacctgggaaaattctcaattggtgttcgccagattgtataactgtttgaccttcaacacaaaaaacaatcgatgctgaattgttatcaagcgtaattgactgttccgatagagaataaatagaaaatgcaaaatcatccactggaatagggaaatttttagcgattttttcctgccttggtagcataaataaggtgtttgttggttttgaaacaaagtcaaggtttgccattagctcaggaatatcaatatatttgttggttaagcccgctcgtaggacattatctgaatttgccatcacttcaagagcaacgccttccagataagcatgaggcgtacgggcgcatagaaacatggcttgaccgggttcaagttcgatgacattaagtaaaagtggaataaatagaccattgtcgtcagggtaaaatgccgtcatttttttgatggaatcccaaggttctccgagccgactattcaatgctgatttcaatacgccaagagctagctgcttttgtttaccactcatattcagtaattgggaaaataagcaggcaagattctgttcatttggtgtctgaataaagaacggaattttgggatgggccgcagtaataaatttcagtaattgtgcgatttcgtttaatggacggaacccattcattgcccggaaaggggtaagggcataaaccaattcgggcttatggttatcatctttgtaatttctttccggggaatccaacggaataccggcgatattctctttggcaaacccctcttctgcggattttttatcaggatgaacctgaattgagagaggttgagccgcacacaataccttaaataggaaaggcaaacggtgaaagctatctgaaacttttttccccagatatttttccggatcactggctattaattcatttaaggcaatgggttttcccgtttctgggttggctacaagtgaactgcttttaggatgggtgcccatccataattcagccattggcagattatctggattttcaacaccataaatatccatcagggcggttttgcttccccatgaatagtgctggatctgatttatcatcttcaacatggccgttactctctttttaaaaaaatcaatctatttcctttctaccacaatacgataaatacgacttggttggcataatcaggaactaatatgtggcatgataacagaatgctaatcagtttatctgcaaagactgattataccctatggattttaagatgcttcgcgacggcaagggagcgaatccccgggagcataggtaactatgtgacgggggtgagcgagtgcagccaacaaagaggcaacttgaaagatgacgggtatatgcatattcgattattctgtgtgttaaggagagatagtaatggcagccactcgcattgaaaaagactcaatggggcccatcgaagtacctgctgaccaattgtggggagcgcaaactcaacgttcacttgagcattttcgcatttcgcaggagaaaatgccggttgcattaattcatgctctggcattgactaaacaggctgcggccagtgtcaatatggatttgggtcttctgccgcaagaacgtggtgaagcaattattgctgctgcgaaagaggtgctggaaggtaaacatccgacagaatttcctcttgctatctggcagaccggttcaggaacacaaagtaacatgaacatgaacgaagtgttggcgaaccgtggtagcgagatccttggcggggtgagggggagtgaacgccttatccatcctaacgatgatgtcaataaaagtcagagttctaacgatgttttcccaacagcaatgcatgttgctgcggttattgcgctgagtgagcatcttattcctgagctgaaaatattacaaaaaacattggctgataaagctgaagcttataaggatatcgttaaaattggccgtacacacttgcaagatgcgacgccattgacccttggtcaggaaatttctggctgggcggcaatgttaacgcataacctgaaacacattgaagacagtattccccatgtttgtgaattggcactagggggaactgcggttggcaccggtttaaatactcatcctgaatatgctgttcgtgttgctaagaaattggctgaactgaccaaccattcgtttgttactgccccaaataaatttgaagccctggcgacttgtgatgctctggttcattctcatggggcattaaaaggtctggctgcatccataatgaaaattgcaaacgatgttcgttggttggcttccggccctcgctgtggtatcggtgaaatttcaattcctgaaaatgaaccgggtagctcaatcatgccaggtaaagttaacccaactcagtgtgaagcagtgacgatgctttgtgcacaggtgatgggcaatgatgttgctattaatattggtggggcatcaggcaactttgagctaaatgtgtttcgcccaatggtgattaataacttcctgcaatctgttcgcttgttggctgatggtatgcgtagcttcaatgaacattgtgcagtcggtatcgaacccaaccgtgatcgcattactcagttgctgaatgaatctctgatgttagtaacggcgctgaatacacatattggttatgacaaagctgcagaaattgctaagaaagcccataaagaagggctgacattaaaacaatcggcgatgaaactgggttatctgacagaagctgagtttgatgagtgggttcgtccagaagatatggttggcagcttgaagtagttgttgcttagccatgaaaaattgaccggagacgagtgctccggttttttgtttcacgatctttaaattatttttttgcctttactaaacgggaatcaatgccaaaatccaagcgtttaaccgtgtttatatatttatgaaaatctttcgccataggattcaaaatgacgttattttcgtaggggacaatggcagagggaactaccaggccaatagaatgactaacctcgaaccattcactgcctatttccattgtgcaagtagaaggtacgggagcattccaatcagaaggtaatgtatcaatgtctaaaatatcaatttggttttcagggatgtcgatacttaacaaagcaaaatcagtgagaagttcatcatctccgacatgaacaagtacttctagcacagcaagagaaactgaagtggctacataaactgcgggtcttcctatattgtgccaacggccaccatataactttgctcctgtaccactccatgctgattcgacatattttgaacgggtaagtcggtataagatcacgatacaattccgtgttcaatcctgccgatgagattcatgacatctagcgctccactttctgtatcgagcattgattcaggcgttacgtatcctaaaccccggataggtcgcttcatccattgagctgctttatctttgtcaccattaaataaatctacagcatggtccatgacacgtacaaaccgagcaatgcgctgactttcatcagcagtaaatttacctttacctgaacagcgtcttgaataactgcgtatttggatacctgcaatccgcaaaatatcccctttaccgaacgttgaccagttttgtattttatcaactatagtgactggtaacccttcatttaatattgcattcaaatgtggcccactgcttgatgggaaaccaactgttcgccaaagtgggttactctggactttgtggcttggtgtaaaaactcgcataagcacctcttttatcatttgtcactattataatagacagttgaccaaacttggtcaaataagcaacatgcactaaatctcacgatataaatgtagccttggaataatcaattctagtggtttagctttgggtttatagcgatgcactatggcattggcatcatagttagcaagtctacctatctttggttggttatcgccatagttaacataaaatgcaattattggcaggggacaagcatattgcacctgtttttgttgttccgcataccagactcgtgcaatgggctgcactttcactgggcgtttgatttttaacaccacatcgtccggtaatttttttatatcgataatttcttttgcgaccaatgctgcccattgttcacgagaatagggggaaactgcacgtccagagttatagcttttctccaaacgttgcagaatttgatcttttgtgactttattgatgatatttttatttgcccaaccaaaacgaactgaatcgggattgagaaggggagtgatggttctgtaagcgtttaaagttatcaaaccatgtaactgactgtgaacaaactcaaaccgctgctctttatccacccctgattgcaccgttacgatatgttcaagctctgctttcaacttattaatttcctcaatcaaaagtaaagcagaacgatattgttgttggttcacagaaaaacataatacaccgggaagacgaacggcagctttactgctgatattttggttattgtgatatataaatagcttctggtaatgacttaatcctatatttcgtgcgtcattacccgtcatttcattcacaatgatttctgttactggctcatgttcacagcctttttctacatcaggcaaaataaacacatgagcggccaacaaagaatagctatttaattgttcatacagttgcttcaacttactctcttgttgttgaaaacaactattcaaatcgtcaattgataaatatttactcatttgaataacacaattagttacaacatactttttattataaaacaaaaagtgaaaacatcaaactcaaacgttgtattcaaaagcaaaacaggtacacatggtaagcttgaacacgccaaagggaaaattaaaaggttttttgacttccctaataggctccgttcgttatccttgtgaaaaactgttaaaattttactggaaacatcgggaaatagagataggttttagtgaattaaaaaggcaacagctcagaagctatgggagattttgattcacctataatttgataagaaaagaaatgttagccatagcgggaatagctgaagtattaccaacaaggataaatctcattgctgtattaaaccgaattgaataatctcaaatccgttattgtgaattaaataccagaagacggttacctctcaaattgaaaaagatgaagaaataaataacgtttcataattctgctacacatgaccttcttcaacccattgttatacatagaattatgagtagtataagatgtagcgctatttgggaatattatttatataaatatgcttatcctacccaaaaagaaaaatcgttgaaattaccttttatgaagacagatttttactgtcgcctttgtgccatacgccacacaaactccttgaatattaaaataaacaataaaagttataatatccttgagtcgaaattcatggttggattgtagatgtcatttattattgtgcttcattaaaggcacaataattaaaacgtctacctaaatgaatgtgaatacaatgaataccacataaactaacgaagaatgattatgggaatactcacaggcagcgatactccgatcccaggaaaatcttatattattcatccgtatccagcaggtgattacgcgactgctgtaacggtagctagtatatttcatgcagcgccggggagcgtgtcattggcaatatgggaaagcactgtaccataccaaaaatttgagtgcgtcggggatggaaaggggagaggctaccttggctttatttgccgggcatcccctgtaagtgatcgcggggcttaccttggctacaacgctcacgaaatacttatctgtaaagctcagtaccaacaaaaatgggaagatatggttgttgttgagcgtccggctggaggattcgagtggtgcatgagaaaggatgaccatcttgcattcgttggaattcagggccacatacagctaaagatatttagagactttaccacgacgtggggcttcaccgagtggttctgatctctaaatccaacacttaactactggcgttgttttaatatttatttccggcactgtggcaacccggggaaccgggttaccaagatccggattagtgaaaataaccagttttttgtttctttgtacgtaattacgaatgtggctgcgttttctttccaccaatccaagtttcacagactccgattttgctctgggccaatggctgaaccggtcgtatcgcattttctgttaactgcctaaagttgattaacttgtcgttactgtcacaaaacagaagatatgaaagttgtgggcatccgtgatgttattttccgaagacgattgcaccggattgttagagttgagagggatcatctaggagccggaaatttctagttgtaacggttcgtaattaaaaacagtctggctcgtgctcgtatttacccggttttttggtattctgattatgttaataatgtgtaaataaatttaatattatataaggaaggggtgatgaaacgaaaaacggggtttttctttgatgaacattgtttttggcatagtactggcatgcatgtaatgactctacctgtcggtggttgggttcagccttcttctggaactgcacatgctgaatcgccggaaacaaaacggcggttaaaaaatttgatggatgtatcaggcttgagccactctttacacctttcttcggcatcgcctattgatgagcaaacactacgtaaaattcatcctgaagagtacttgaagcagtttaagcgagtcagtgataacggtggaggaatgcttggtatagaagcctctctaggaccgggaagctatgaaattgctaagctttcagccagccttgcttgtgcggcggtggaagcagtgcttagtggtgagcttgataatgcttacagcctttctcgaccaccgggtcatcactgtttgcctgataaacctatgggattttgttttctagcaaatatcccattggcaattgaacaggcaaaagcacgttttgatttaaaacgagttgcggtcattgattgggatgttcatcacggtaatggtactcaacatatttattgggatcgttctgatgttttgactatctcgatacatcaggatggttgtttccctccaggatacagcggtgaagatgatatcggggaaggtgaaggaaccggttataacctgaatatcccattacttgctggagccggacataatagctatatctatgcaatgacacagatagtacttcctgcgcttgaacgctttaaaccagaactgattattgtcgcctgtggctatgatgcgaatgcgatggaccctttggcaaggatgcagctccatagtgaaagttttcgggagatgacccagctagtgcaacaagcagcagatagtttatgcgacggaaaactagtcgttgttcatgaaggcgggtatgcggaatcttatgtcccattctgtggattagctgtacttgaacagatgagcggcattcgtacagaagtcaaagatccaatgttagattctatacgcttgcagcagccaagagctgagtttgagctatttcaacaacagcagcttgataaacttaaagaaaaattcggtctttaagctttgttgcataggtttgctccatgctccacatagtttggaagcaaacctattaaagtctcaccttcataacatatcaacgacacgtcaataaaatttatagaaaataactgagttcaataaatggaaaaaaagtccgataaacaggaacagcatgaggctgttcccgataatagttatgttatacccgtcccattgggtatataagatgtaccaaatatcaagcagggctaattgttgtgtcaattacttggtaaaatgcatttagggtatctgagattgtccaaacacccagtataacgtgatagccttgataaccctctggtaaggtacatttattaataactctgctgctcggcattttttcctgataatcctcaaagcagaaaggtgtactattaaattgctctctggttaaaggtttattgggatcccaaccaagtttggtaataaaatattcccaacttgaggttttgtgttgaatcataatttcccactggaactcaatctcaccggcagtaatagggatttttttccaacgatcttcggtttgagcatccaatgcgccaaaatgaccaatgccagcgctggcaatatgaccatcttccgggccagcttgtggaaagcctttcttagcttcaagagattgaggctcatacttaaccaacccacaatccatattttgttcatttccttgtgcggaacaaaggaatgcacgacttcctgggctatcaatataaccatgagcccatgtaccattagataaagctgtaattatcgtagcggctaaagccatcactttcactttatgtttatacataatagcgtcctccactttgcaggataatttatctacgacaaataaagccccaggacttaactatcaattctagataaatataatatgattatccatttcataaattgattaacaatttaattatattaagttattgaaattttgtttaaaatatgcctgttactattttttgtaatataaaaggagattatcatgcagagtaatattttggtcacaggtggtaagggaaaaaccggaaggttgattagtgagttactgacccaaaatgggatcacgcatcggatcggtacccgcacccctgaatcaagtaatgaaattgcctttgactggatgcgccctgatctggctgaagccgcattttctggcatcaggtcactatatattgtggcaccaacgaacaccagtgatcatggctcagtagtaccaccattgcttgaaatagcgctagaaaaaggggttcaacgttttgtgttgctcagtgcatcgtcactggcctctggtgcaccaatgatgggaaaaattcacgcctggctggaagctaatgcgccagaatggacagtgttacgtcctacctggtttatgcagaacttctatgaacaacggcatttggtaacaataaatgaagaaaatgctatctactctgcaacgggcgatggcaaagtggggttcattgacgctcttgatattgctcaggcagctgtttctgcgttaacatcaaatctaaccataaataaagatttcatccttacagggcccgaaacactgagttatggcgatattgcttctgcactgagtaaagccttaggccgcgaaattagtcaccgaaatctaacgaccaacgaattggccagtcggctacaacaaaatggactggatgaaacctactcaaaaatcctttcagcaatggatagtgacattgcatcaggtactgaagaccgcattacagatggcgtcaaagcattaacaggtgtaaatccttgttcactggatatctttattcagcgggaatgtcctcgctggagataataattaaccaatatattacggtttaaaacaaccaatctgctcaaaaccgtaatatctacttaaatgctacaataatatgttattaatgtttaataacataaagatcttttgtcgatacgaaacccaatggactcatataatacccaccaatataaggtttgactaatctaacaccgatatagtaataaacgggaattgctggtacatcttttgccaaaatgtcttctgcttgctgaaaatattttcgatcatttgttgctttagctttatttatcaaattatcataagcatgattgctatataagaatgtattattagaactatcagtaacaaaattatttaaaaacgaggcaggattatcgtaatcagcgatccgtgcatatctcaccatctcaaaattaccttgatgaataacatctaacatagcttttcgttcttggttctgcaaagtaatatctacatccagactttttttccacattgaagtcgccgcaatagcaattcgtttatgctcttctgatgtattataaagaagtttaaatttcaatggattatctctattataacccgcttcatttaataatttcctagctttctcaattcttgcttgttgtgtccatgatgcataatcaggttgccctaaattcactcctccagtatttggtggggtatgattataagcaggttcttggccttgccccaaaactttattcgctataatctctttatctaaagccaaatttaatgcctgtctgactctgaaatcattaaaaggtgctttttgattattaagatcataataataaacacctaatgctggtgtgatatgaacttgattacctaattttgcctttaaggatttaaataaaatcgacgggatattcttggtgatatcaatttctccggctagataacgattaatatctgccgtttctgatgctattggaaggtaagtgactttattgataacagtatgagcactatcccaatattgtgaattcctgacacccacaactttctcattgacaacccattcggacaacttaaatggcccactactgacaaatacatcgggatgagtccatttttcgccatacttttcaaccgctttttggctaataggcaccataacagggtaggccaacatcggtaaaaaataggatacgggttgttctaacgtcacttccaaagtcaaattatccagtgcttttacacctaattcatcagtttttttcttaccagcaacaatatctttggcattgactacgtgcatgtttccaagataactgccatacggagacgcaattttgggatcaactaaacgtcgccagctaaaaaccacatcatgagcagtaataggggagccatcagaccaccttattccttttcttagatgaaataaccacactttattatttttggtttcccaactgaccgctaaatcagggatgatttttccatcactgccagctctgattaatccactaaaaaaatcatgaacaatattaaactcaacatcattttcaactttatgaacatcaagagacacaggttccgaaccattattgcgaacgatatcttgattaactgacaataatgtacctgctggaataattgcggcatgagataatgccagattgaaaaatataatacctgtgaataaggatatattccttaatgttttattcatcatttgttctccaagaggatctcattttggggtagctatttcagggaaatcaattatttgataattaaggtttttatttaatcttgcaaaccaaacctcagaatgtttatgattatttaagatattaagtgattctattgaataccctattttgaatgtaagaggtataactataattaagtattagcataaaatacttagtgctacttcatcaatcatgagcttacagtaccaagtggaataattgctgcatgagataatgtcaagcctctaaatataattcctgcgaataaagatatattttttattgtcttttccatcgtaatttctccaataagacttcgctttttaatattgatgttgcaaattgggcaatctttgatattagctcgattgtaaataatcctgccgaggaataacccccgaatcttttcttccagtaaaaaaaatcctcgatcctgctcacagatcggccggtatattttcctgaacaggagtgtcgaaagttacatctatgtctttaattactcttttatttttgttttttagttgaaaaattaacatctacataacaattgaacatactaagttataggttatattttatgttatccaatccatcaggaggtaaccatgccggtaccaacgctcaggcatttcattaatagtcagtatgttgaatctaaaagttccgaatattttgacctaataagcccggtcacgggtgaaacctatgcgcgttctcctaacgcgactatagcggatgttaatgaagcttatgcatcggctaaagaggcattcaagatctgggggcgcagcacaccgtcagcacgtcagcaagcgttgctggcattagccgatgcggtagaaaaaaactctgaacgtctgatcgaagcgcaaagccgcaataccgggcagctcaagcatctgattgcctctgaggaagttgcggcgtcagtggatcatattcgtttcttcgcgggtgccgcccgttttctggaaggcaaagcgacggctgaatatcttcctgatatgacgaccagtattcggcgcgaaccactcggcgtggtggggcaagttacgccgtggaactacccgctgatgatggcagtatggaagatagcgcctgcgttagccgcgggtaataccgtggtactcaaaccgagcgataccacgccggaaagtactctgttgctggctgaactggccgctccgttcttcccgacaggtgcattcaacgtggtgttgggtaatgccagcgcgggggcgctggtcgtttcacacaaaacgccagctatggtttccatcacgggttccgtgcgcgcaggtttgcaggttgcctcttcggcggcagctaatctcaccagagcacatttggagctaggtggcaaagcgccagtggttgttttcgccgatgcagatatggacaaagcggtggagaccattgctaccgcagggtatttcaatgcgggtcaggattgtacggcagcctcgcgtgtgttggtgcatgaatctgtttacgataccttcgtcgctaaactggtggcggcagctaaagctacccgctttggctacccggaagatgaagaggcgctatatgggccgctcaataatgctcgtcagctggagcaggtcaaagggttcattgcacgtttgcccgcgcatgcctgtattgaaaccgggggccgtcaggctgagcgctcgggttattactttgaacctacggtaattaccggtctggaacagcacgacgaagcaatccagaccgagattttcggcccggttatcacggtgcagaagttccgcgatgaacaggatgccatagagaaagctaacgacgtgaaatacggactagcctccagtgtctggacccgcgatcatggccgcgcgttgcgcctgtcacgtgaactcgattttggtaccgtctggattaacacccatattccgcttacggcagaagcgccgcacggcggcttcaagagctcaggatatggtaaagatctgtcggcttatggcttcgatgaatatacgcgtatcaaacacgtgatgagttccaacgactgacacaggacatccgtaatgattcagaatagatctccacgcgacttggtgtcgcgtgcgcaccacgaactgtttactgaccgtgatgtaggggcacttgatcgttattttgcgccgcatttcatcgaacattccccgttggttaaagagggtcttgccggattgcgtgagctggtctggacacatcctaaactgcaccacgaaacgtatcgtgtattgcaggatggtgatctggtcgccatccacggtcgttttacgggattagacgactggccgttggtcggtttcgatctgtaccgggttgccgacggcttaatcgtagagcactgggacggcctggtgccgcaggctgcacccaacgtcagtggccggactcagttagacggcccgactgaagcaggcgatgaccatgaccgagagaagaatcgcgaactggtggtcaacttttttacacgtaccctgatcgagggtcactacgaagagtttggaaactacactaatggtgaattgtttcgccagcacagccccgatattcccgatggtacggcggcagttatctcgtttcttgagcaactcagagatgaagggcaggggctgcattacactaaaattcaccgtacggtagccgatgggcagtttgttctgactcattcggaagggagtattgccggagcgcgtcatagttacttcgagctatggcgcattgaggacggcaaagtggctgaactttgggatgctatcaccccggtaccggaggatgcgaaagcgctgcatcgccacggtattttttagcgttgatcgatacccggcgcgaagcttgtggtcgcgccgctaccggatgcccatacacaggcagatatgcgctcatcgacggtccctctgtggattatgtctgcaacggagcctacataattacaatgcccactcggtactcatcgttggggattttgtcggtgcggcggcggatatgctagtttcgacgctggatcggttacttctacccgctttggatagctatttacatcgggcgtctgtctgttgaagctcgcttatttcagattgctgaggagttaggagttttcatttatgactgaatctatgctagccaaaagacgcagcgcggctattgcaagaggcgtgggcgtgaccacacaagtctatgcggagcgtgcggaaaacgctgaaatttgggacgttcatgggcaacgttatatcgattttgccgccggtatcgccgtggtgaataccggccactgccatccgcgcgtcatcgcggcagccagagaacagatggaacagttcacccacacctgccatcaggtggtgccctacgaaaattatgtggcgttggccgaacgtctaaaccgcttggtgcccggtaatttcgcgaagaaaaccgtctttgtcactaccggggccgaggcggtggaaaatgctgtaaagatcgcgcgtgccgctaccgggcgcagtggcgtggtagctttcagcggtgctttccatggccgtaccttcctcggtatgtcattaaccggcaaagttgcaccgtacaaaatggggttcggcccgctggttagcgacgtttaccgtgttccgtttccggtcgggctgcatggcattagtgtggaacaaacgctgaatgcgctggaaaatctctttaaagccgacattgagcccacgcgcgttgctgccatcatcatcgaaccgatacagggcgaaggcggtttctatcctgctcctcccgagctgctcaaagcgctgcgtgagatcgccgattgccacggcattgtacttatcgccgatgagatccagaccggtttcgcacgtacgggcaaactgtttgctatggagcatcatgaggttgttgccgatctgaccactatggcgaaaagtctggcgggcggtttgccgctggcagcggtaacgggacgtgcagagttgatggacgctgtagtgcccggcggtctggggggaacttatggtggtaacccggtggcgattgcagccgcccatgcggtgctggatgtgatcgaagaagaaaagctgaatgtgcgagcgacacagctgggagagcaactaaaacagcgtctgcatgaactgcgaccgcatgtcccgcagattgccgacgtgcgagggctcgggctgatgattgcggtggagtttaaccatgcggacagtcaggaacccgatgccaactttaccaacgcggtacgccagaaagcgctggagtgtggtctgatcctgttgatgtgcggtgtacacggtaacgtgatccgtttccttccgccgctgaccatacaaaatgacgtttttaatgaagcgctcaacattctggaatctgtgctgctcgatctgactaaacagtagagtagatataatcggttacctcacaagaggggataacaatgcactggtatttaaatgtattaaagaactatgcatatttcagggggcgggcccggcgtaaggagttctggtatttttttctgttccaaatcttggctgtatttattatctctttccttgaaaactactttgctgttgccaatcctgaaatttatatgggctggttcagcgctatctatctgctgctcacgtttttgcccgcgctagcagtgaatgctcgccgcctgcacgacatcaactgtagcgcttggtggttactgctacatctcataccgtttatcggcactattatcctgctgattctcgccggtctgaaagggagctctggcaacaataaatacagctcagatagccggactcacccatagcaaaactctccggactcggccagcaggtgatttcaagatcatgacaggagtgttgaaatgacaatgaatagaagagcctttatctctaccgtcgcgacgctcgcgggggcaggagtgctttcatccgcacttcccaatttatccctgctcgcccggaccttaaccgcggccgatgctccggctaacactattgataagctccggccaacactattggaggatgcacagcatagagccagccggttgggactggatccgcgcatctggagctggcataaagacgctgctgctggcgtcatgccagccaactattatgaagcttctttagctgactggcccgctttgggaaacctacccggagaccagaactgcgaagttgtggttatcggcggagggttgctgggtgcttccacggcattgcatcttgctgaagcgggagtggacgtgattctggttgaaaaggataacattggttcaggagcttctggccgcaacgggggacagataacccctgggctcgcacgctgggaagctaagaccatactggaaaaactttcattcgatgaggctaaacgcttatggcgttttgcctctgttgaagcgatgaatctcttggatgaactccgtgagcgttatcgtttcgaatgtgaccgcaaatatggtcatatcactgttgcagtgcacgcaggccacatggggccgctggtggctaatgccgatgcccggcgtcaactgggagatacggcgatgaaggttatcgggccgcacgaattgcaggaagagtatgtgcgttcgggcatctaccacggagcaaatatcgacagtatcggtgggcaggtccagcctctggcactgttgcgtggtctggcttatggtttcgccagactgggtgggcgaatctatgacagcacaaaagtgaagggcatcaagcaggatactggtggcacagtcgtagaaactgagcgggggactatcagggcaagtaaagccgtggtgttgggtgtgcatggctccacgggtgagtttatctccggcccttccaccacggtgccttttttctcctacgtggcggtaacgccgccgttgccagtggatgtcaaagaattgatcccgtcaaatctgccggtctacgatacacagttacaggttgactactatcgtgcggtgcgcaacaaccgcctactgttcggtggacaggggactggcaattcctggtcaccacgtgatgtgaacaactatctgcttgggcgtatcagaaccgtgttcccgcagttggaaaaagctgaactggaatattcctggggcgggatcagcgatctgaccctgaacggtgccaccgatgctcgcaagagcaacgacagagtacccgtgtatatggtacatggctggagtggtcatggcgtggtgcaaacggtacgcattggcaaagctatcagcgacgatctgaccagacgcaacgacgactttaccatgcttacctccattgaccacgcgagtatcccgctgggttcctatctctctccggtagccattccgttggctaagggtattctgggagtgatcagcacgcttaatccggcagacatagtttcgttctgagcattacctcactaatatgtcttatgtgagcacttctggagtaactctctataagtattctgtgtttcactaagcaattattgataccgccaccgcatgatctagagtcaatagaactctcaaattgcgcctgtaatagcactacacatagcactacacatagcactatacatagcactacacaatgaggaatatcaaatggatcgtatgctagaaggtaaggttgtgattgtcactggcggcgcgagtggcatcggagcaggtattgctttagccgctgcgcgtcatggcgcagcaaccgtaattatcggcgatatcacggatcaaccccgagagggaggaacgccagtgttccagcgtctccgtgcgcttggtacacaagccatattccaccggtgtgatgtcacctcgcgaagcgagatggatgcattagtcgatatcgctacaccattcggcggtgttgatttgatggcttgcaatgcaggaattgcattagctaccgatggcccacagattaatgcggacgattttcacaaactgcttacggtcaaccttgatggtgttttatttggcgcccaggctgctgctgaacagatgataaaactgggcaaacgcggaagtattgtagcaacgtcaagtatggggtccattaggacaggacaacttacaaccgcctattccacaagcaaagctggcgtgaatatgatggtggccgcattggccgatgcttttgggccgtcaggtattcgtgttaatgcagtatgcccagggctgatcaatacagcacttcctctttcctcgccggaagtcgcgaaaatgtttgatgggttacgggagaggatgccccttcgtcgattgggagaaccggaagaggtaggaaatgcagttgtgtggttaggatcagatctcgcgtcgtttataactggcgtatcactgctagtcgacggcggacaaacggtagtactgtgagaacacgcatttttgcgcagttggtatattccaaaggagagtagggtaaaatggctgtttctcaattatatgctggacttctttatatatacccgtcatctttcaagttgcctctttgttggctgcactcactcatcccggtcacatagttacctatgctcccggggattcgctcccttgccgtcgcgatccctcttgaaatccatagggtatagaatcagcagaactgaacatttgcgccagttttatcaattgagcaatttcatcattggaggcaccatttctgaggatatccagtaccgtcgtggattcagccaactcgataccaagattaaatgtcttgattttacggaggaaaaaaccgcacttttttacgccactgactggacctagattagccagcatttctggaacacctgttaaatatcccttattgctagtttttttatttaccgaaaactgaaatacaggatataaattctctattccccaatttaatacaatgagtttatgattttcaccatacttatttactgtcgggcgggtcactcctaatatatcagcaaccttactggacttataaacaccaccgtattccccaagatgggcaagaaaagcgtttctagtttcgataaattcctcgtgttctttcttttcctgtgtgatatttgccactatttcaatatagttagctcgtcctttgacttctgaccaaaattcatcatcaggtaaagtcaacaactgagaaatactctctgaatctttgtttttaagcacattaataaaatgatcagcaagattgatgatacgtgctctgaccagttcaggctgatcaaatccacttttcagttttactgccagagcattgagctctttcgtcgttgtccccatagagttacctcaattatttttgtcatttttaaaaatgagcatacatgaaatggtaagattttggcacctatggtcttaatcgtttgtggaaaaacctcagccgagctccttagtgcaagcattatttctcagcactctttccacaaatcagaataaataatattatcatctaaacttaaactaaattcataaaaaggatcatcgaaaaaataagaggtatatatgcacagccaaattaattcattgccccaatatatgttagctatcagtatcattaagcccggaggcccggagaaattgcatttggttcaggttccgttgccgcggccaggaaaaggttacttgttagtaaaagtggcggcggcgggtgtgaatcggcctgatatatttcagagaatgggttcttacccaccaccacctgatgcatctccattgccggggttagaaattgcaggagaagtggttgccaaaggtgaaggttgtgaacgctggaaccttggcgataaagtttgtgcccttgttgccggaggcggttatgccgagtattgtctggtacatgactccgttgccttacccatctatggcttggattttgttcaggcagccgcattgccagaaaacttttttaccgtctgggcaaatgtttttcagactggtcagttgaaaccaggagaaaatttgctgattcacggtggtacttctggaataggcagtgtcactattatgttagcaaaagcctttggtgccaaagttattactaccgtcggctctgatgagaaagccaaagttgcacacagtttaggtgctgactttgttattaattaccataaagaagatttcgttgatcgggtattgaaaatcacgggtaatcatggggttgatatggttgttgatttaatcggtggtgattatgttaataaaaactataaggttgctgctaaattcgggagaattattcagattggtatgatgaaaggaaaccctgaaaatcttaatctgatgcccttaatgctaaaacgtctgactcacacaggttctacattacgttctcgcagtgtagaagaaaaagcagagatagccaaagagttagaaaaacaggtctggccactactgaaatcaggaaaagtcactccattaatttgtaaggtatttgatctgaaagatgcggctgatgcacatcgaatgatggaagccggtgatgttatcggcaaggttatgctggtaaatgtatcaccttaatagtacttctgcttaaatcagggctattttaacttgtagccctgcattctatctactaacctcttcgcgttagaataaaccattatagttaataaggttaatgacaaataacgctctattttttgattggtttttattcgttctttgtcctcgcgcacaaaatcagaatttatatttaacgtcattgttaatattttaacaaatatagtctatatctattaacaaatgatcgtttatagatatgttaatgattaatctattacacctgatagatttttcttaatgtttagaataatgaggtatgaccagctatgagtaagttaggtggcatacaattttctgtctgcctatcagaggataatagtgatttcattaataaataaagaatttaaaaatctctctgttgctgacagccgtttttgttagttggaaaagggtatgtgattatgaccaagcagtttacttcgcacttaaacattgatgcgttgtttttaggccctaaatcagaaaatacggttttttttagagaaatgatggaatatgccgtaagtgagcacatgcactggcgttctgattttcatcctgaagaccccgccttggtaacttcagttgatcgttacgcacctgattatagagaaaccctttatcggacagagggtattctgaaccagctatctgccaaactgaaaaacacctctgttccctggttttctcctcgttatatgggacatatgaatgccgataccttgatggtctccaatctcgcttatgtcatggctatgatgtacaacccgaacaattgtgcccacgagtcatcaccgacaacaacagagctagaaattgaagcagggctagatttatgccggatgtttggttatgaccctcgccgagcctggggacatatcacatcgggaggaactgtcgctaattatgaagggctatgggttgcgcgtaatttaaaaaccatgcctcttgccattgcacaacacccgcaatctcgtgatttggttgcaaataaatcagaacaacaactgttgaatatgtcgtcatcagacattctggatttaacggatgaattaaagaagcgtggcattttcgaagaagttcgtgaactttcttgccggggtgttgggataaaacagggaatgttcggcaaggtcttggtaccacaatcgaaacattattcatggatgaaagcaatggatgttctagggattggtcaacagcatattgtgccattgccggtcgatgcaaattatcgtaccgatgttgaaaaaatgcgcgaaattacattcagtctgatagagcagggagaacctattctagcgatggtaaccgtagttggaactacggaagtgggtgccattgatcgagttgatgaagttattgcattgcgtaaagagtgtgaagagcgttatggcgtctcattttatgtgcatattgatgctgcttatgccggttatgccagcgcaatgttccttaacgagcagggagagtttatggaatatgatgaacttatccgtcgttatcgtgaattggcaatcattccggaagatattatttggcctaaacctgaaatttaccaaagtttccgggccatgtgtcaggctgattcaatcactgtagatcctcacaaagttggatttattcaatatgccgccggtgcggtatgtatgaaagataaacgtactgttgacctaatttcctaccgtgcagcttatgtttttgaagatgttgatacgcaacaggatcaagctgttaatcggcgtgtcgtgctcggtgcttctattatggagggatctaaagccggagctatcgccgccgcaatttgggctgcgcatcgattggttccactgaatatcagtggctacggaaaagtcattgctgccggtattgtgacggccaattggatggttaaaaaacttttaaccacagaaccattggttgttgataaacgccggtttgaaattcatgccatgccgaatcctgatttccatatggtcaattttacttttaaagagcaaggaaatgatgacttaatacatcataatcgtcttaataaacggatgtacgaactttgttcatatgcctctggacgtacttataccaatgattttttgacttcttccacctcccttggttatgaagagtatggtgatactccctggcattatgttgcaagttgcggttttgaccaaaaagaatggcagaaagtccaccgtttatatgtcttacgggctgctgtgatgactcattgtttacgtaatgctgacgattttgacgagtattgggaaaggctccagaaaatttttattcacaaactgactcaatttattgatgaagaagaaaaaaagaaagtggcctgattttctattattaaatatttgctgttgattcgaagggaaaaaacgtgaagaaccgtacttttggcagtacttttattatcgccggaacaaccatcggtgctggtatgctagccatgccattagccaccgccggtgtaggatttggtgtaagtttgatcatgttggttagcttgtgggttttgatgagttacaccgcattattgctggttgaaacttaccaatatgaatcccctgatacggggttagggacacttgctcaacgttatcttggcagcagcggcaaaatattagccggtttcagcatgatgtttctaatgtatgcattaacatcagcctacattagtggcgcaggggaattactgacagtcagcctcaacaaatggctgaatctatctcttcctgcctcagtcggtgttatcctgtttaccgtgattggtgggggagttgtttgcattggtacccgttcagtagatatggttaaccgagttatttttggtgcaaaaattattttcttggtattaatgttggggatgatgatgccgcatgttcagcatattaacttactgaccatgccattagaacaaggattaatactatcttcaattccggtgatattcacctcgtttggttttcacggtagtgttcccagtattgtgaaatatatggatggcgatatccgtcgactccgctgggtgtttatcatcggcagcgcaattccgctaattgcttatattctctggcaattggcgacactcggaagtattaattccagcacattcgtcaatattttagctgaaaacgcagggttgaatggcttattacacagcattcgcgaagttgttgcttcaccgaaaactgagcttgcagtacaaatgtttgccaacctggcgctcgcaacctcattcctcggtgtcacacttggcctgtttgattttctgggtgatctatttaaacgcaaaaatagcgtagccgggcgtatgcaaactggtttgttaactttcgttccgccattgattttcgcgctattttacccaaaaggatttgtaatggcgttaggatatgccgcggtcgcgctatcaattttggcgttagtattgcctagcctcctggcatataaatcccgccagcaaaatgaacgtcgatatcgggtacctggtggtaagcctgtactattactggtgtttgcctgcggtattgcagtaatagcaatccaaattggcatagtcagtggaatgttgccggaagtagggtgaatacagggttatcgaagacaggttatttttttgatccaaataagttcttttttgacctaaagcgtattctctgacagactgctagcataatagacctattagcggaggcaattatgaatcatacccgttacgaaactgatgtggtcgcttgggcaaatgaacaggcagcgttattacgtgccggtaaattctctgagattgatatagccaatattgctgaagagatcgaagacgtgggcaagagtgaacagcgtgagttggctagccgcatggcagtattaattgctcacttattaaaatggaaataccagccaagccatagaggaacaagttgggaaagaaccattaaagcgcaaagaaaagagattctttatggtttaaaagaatctcctagcttaaagacaaagttaaatgattcagactgggttgatgttgtttggtctaaagccgttgcctcagcaatgaacgaaaccgggttagacgtgtttcccgacgtatgcatttggggtatgtcccagatactgtcccctgaattttatcctgattagcaaaaatctatatgaataatcaaactaaagttttaacagctcacattccacatccggcatgggtttctcaagaggaagagcaagaaagaacaattaaaagataagcactttaaaaacaaaatggagaaaaattaaaagttataataactatacccaatggatttcaagatgcatcgcgacggcaagggagcgaatccccgggagcatagataacgatgtgaccggggtgagtgagtgcagccaacaaataggcaatttgaaagatgacgggtatatctctattttcccctgtgaaaaactaacattaattataaggagttggatcatggcgaaagagttatttactgccacagtaaaatctgtagctggattgaaagttgaatgtacatcaagagatttctccttttatttggatgaaccgcgtaatttaggtggtactaatcaggggatgaatcccgttgaagctttactctgttctctcggggcctgcaaatgtatcgtagcaaaggcttttgctaaactgcacaaaattaacttaattgatattcacgttgatctggaaggcgagcttgatactgatggtttcactggtagaaataaacaagcgaaattaggtttctccaaaattgtgacaaaatttcatattaaagctgataatagtgaagaagaaattcatgcctttgtcgactttattaataaaacctgcccagttcacgacactattgagaatgcaccaagttttgtcactgaaatatattgtgaataagataaatactgagttgaaataattccgaaaaggaaaaattttttaagttaatttaaaaagccctctactttttagtagagggcttcgttataaagttaggtaaatcaatgtttatctatcgctttctttatcccattgataacagaataagaaacaatgactattgtttaataatgtaaacggtagttatattacaactcgcattttctatgccaactttaatatttaaaccctgtgcataagcttggcttaatagcttgttaatgttatcagcgcttgaacctgaccaaatataacctggttttccacagttaccggctaatcctccactgaatgtataaagataatgtgcaggattgtcccaatccgctttaatttctgcgactttgacaatgccactattggtttccgcagaaaatgcagggatgctaatcataccaatgaaaataaatagcatagatatcaattttttcatattctactcctagttaataataaagaaaatttgacgcatttgaagtgtaaattatgcaaataatctttgcatcaacttcatattaatataataggttcctagcatgataaataatgccggaagttttttcattaaaattaattaattgatataaataacatcaacattgtttaaaataataaaaacctctacctataatggttcataatcaattcaccaattaattatattaaaacaacaaaaatccattctcataacaaactatttatatcaagataattttgacgatgaagatgaaatgattaatcatctattcaaataaaataacggcgataaattatttacttgataaatatcttttaatatcgttttatctactcgacactaagaaaaaaaatttttaacaaatcacttctattaataaattttttaacgtagaagtatatatatttctggcgtatcccattacactatattaaatagttaatatacatattattaatctagtaaaaggctccatcgatatggataaatcattgtacaattcagaatcaacattaaagtcttatttaggtataggaaatgagggagtatctgataaccttttagcggtacttaaaagcaattgtgtcaattatcagtcgtcagtaaaaaaattcatagaacttcttgaatatattcaaaataataatattcgcacgaaaccatttaatgaattagttgcgcttcatgaacttgtagctccacatgattgcgctgtagtttctatgctatcaattcattataatttagccatcggcactgtcgctaacttaggcgtgcaaactccatatgtggaagatctttaccaaaaactttgttcaggtcgtgccattggagtatatctggcgactgagctagctcacgggaatgatctaatcgcaatcgaaacacaggctaattatctgccggaaaaaggcgtattcatgctaaattcacctagcccaaatgcatataaatttatgcctaataccatgccttgtgaattacccaaagtggctgtaattttagctcagttaaatgtatcaggaaaaaaatatggtattttcccatttcttcttcctctgtctgtaaatggaaaattaacgcccggcgttaaaattaccccacttggcgataagcccgggttttatttagataatgcaataacttcatttgataatgtcgaaattccctttgaaggactccttgcgggtaatatgataaccctgaccagggagggtaaagtatcattgcatattaaagaattaagagaaagattctcgttaattacaaatagaatacattcagggaagttatgcatggcaatgatctcagtgacagcggccaaatcagttcttcatataactagcacatatggaaataaacgacaaacattcggctattcaggtgctatgccaataattaattattctcatttcaaagaaggtatcgcctgggataccctgagcaccatcactcatacgttatacttaagagagctaacaagaaaagtttcaactatattatcagaatcaattaaaaactttaagttttcagatgaactacttattgaaatcattactaccaagtccctgtgcacatggcgtacacaagaaatattaattaattgtcgtgagcgttgcggcgcacaggggttatttacggttaacaagatatccccttatttgatatctaattttggtacgattacttcggaaggtgataaccttgtattatcactaaaagccggagggatgatcattctcaataagatgaaagaaataaacaaagcatctttccaacataacctatttcccattttgcatgactatatgaactttttatataaaaagttaaatggattaatagcgagtaacaataaaaagataaacttagatattcttaataagcatagtggggattttctagaactaagccaaacatatgccgttttatccgtggtgacgacaactattgatgcataccatgataataatgatgatgatctttgtatgatcatcgaaggttatcttctcgactggattcatcgtaacatgagcaatctcctgagaagtgaagtgatcaatttacaagaatctaaaaaaatagatgagagacgcattgagtatatacgccagcatgcagacagaataaatgattatattcccagttttggcgtagataaggctggaatcgaaacgccgatatccagtgatgattatatttcctggtatgcaaataatcaccatcagttaaaaaacaattaaccccaggtatgggaaagcaggtcaaaatgcggggtactacctaaagttaaaattaattaaaaaagcctctatcttactatatacccaatggctatatgcccaatggatttcaagatggatcgcgacggcaagggagcgaatccccgggagcataggtaactatgtgaccggggtgagtgagtgcagcaacaaagaggcaacttgaaagataacgggtatagaggcttttattgctaaattcaggtagtcagtaactcaatattatgtttcagatccatttttctcctcagctaatttatcagccacttgtttagaaaactgattaccgccatctcgtgcggtataatgcaaatgaataagaatatcttttaatttccaaccgccattaatgttttttagcacctgatcgataacttgcttatcagggaatttcaggttccaggttgaaatagcaccagttccttcaaatggcagataacgatcatcatcaaacatcaaggtacataaccaattctctgttgctactccaccatcatcttcatgtattgaagagagggcaatttgttgctgtgcgcgtaaattggttttgatatttctattgttgcctgcttttctcgtcggatcatagagccaattaactccgttaatatcagtatcaactaacgttgaactgcttgtttgtgtcaaaatcgcgcaaatttccggggtagctattggctcggaacccgcgttttccagcgataatgacacagaaacccgttttatctgacgcaaataatgtccgggatagtttttatcaaaggcccgtgcgtccagagtgaaatttatctcctgttttttgtcaatttgatcagttatctctttgatagaagacacagtactaagaagagagaaggtttttttgatatttaaacagcgttcgtgacgctgtaaccaagccgcttccatttgctgtagatccaattgtaatgattcgcccgccagaaagccccgataggaattattccaagcatcggccttgataaaaaaccttgttgttgataatcaccaacttcataacgccagccagcttcaaccattaagcacagtgataaaacagcatcataggcaggagcatataatatagaaagtcgattcatcagccattgatatgtcggtacaaccagaaaacctgtcgttataaattcatacaactcaacagccgcatttcgctgtgcctgagcttctcgtaatgagatttgagcgctttgaatcagtaactcctgctcttttaactgcttgtcaatgatattgatttcactttgtgcttgtttccactcaatttcccaatcctgacgccgctgctgatagtttgctccatcttgaagccgatccgctgtcatgcctaatgtcagtccggtgatttcagcaactagtgctgttcttaccaaaggagctgcgtagttacctcctcctaccgccagaccaaaaatattgggtaaagtttccaccgcggcactcatgatatggaagggaacggctgccattcttgtgatttccgatgtagtcttgagagctatagctgatatttccaagccagaaagattctcttcatataaaccgtagtaatgctcataccgttgttgcgccatatttttacttgcttctaaagcagctttactagcctgagcaatttcaatagcttgttgttgcaactctatagcaaaagcagataacttaatgacttgcgattgttgtaacacctgttgttcagcgttaatctcattttctgtcgccctgaacagtctatctcctagttgaattaactgtttcacggctttactggcacgttttaacatgatcgggaaacgatagggcggaacttgctgtagcgaactattagatgtaccggcgatattacccgaatgtcgctggattagtaataacgccgttcttcgcaaagccggtaagataccaggaaaggcagatgaaagaataattcccagaaatactgtccattagcaccttggaaatcgacaggggtagattgagagcctgtacctaatggagcactatttgacagaggcagctgctgcataagtgccccacagatttttatggtctcctatttctcttttcacaactttagtcggtcagcaaggcgtgccaataagtccatcctctcatgaaaaattgccactattaacgcaggagcatctttgcgtggcaaacaaaatacatagtgatgttcacaacgcgccatgcgcaatgctggaaagaattcgctcatatccttgaaagattgccgcaagcgagacgtccaataccttgtttcagggtagtgatgtaatggtgtacctgagcatccccccattgcttacgtgtataactaataattgtgcgcaaatcggcttcagaggcttctgtttagtatatagtccattaatcgcgtccgttcttggcaagttcttcattaagaatttcgtcgatgctttttttggataccttgccttccatcccttcactgatccgcgtatttaacaagaccttcaattcttgccatgcctgatcactatcggtcatgtcagggaacaaacgttcgagtgtatattgcttgattgtcttgccatgcaaggctgccagcgctttcaaacttttgtgttgttgatcggttatatcaatagttaaacggctcatagtttattctccttatgaattcacccacaaacccacattagcacatatgatgtcttatagctatttataaggccatctcagcggagtttcatcagatgcttatttgaagcacgttcacactgttttcttggtggtttatatcgtattcaaaatgatcaaaatattgctcactttgttttctagagtataaaaatctatggccgccctcgtttttacaacactcatttttgatgaatttttggcttgcttaaatctatccggcgtcactgtaggcaaggagccgagagcataaaaccttggggcatttatgtggtaaagcagctaaagaagccactttaacgtataagagcctatctcaataggcgtaattgttgcagaccattcttatcaatgaacagtgaacacggacagcgcggaaaaaccggagcgtacacgtagtacgtgaggattttgagcactgcccaggttcgctctttatggcaaagaagggcaaataaaatagctctattgggataggcagtaagtattcatgggccgataatgggtaatagtcagtaactcaatattatgtttcagatccatttttctcttcagctaatttatcagccacttctttagcaaactaattattgctatcagcattttttagtacttgatagataacttgcttatgataaccaatccatatttctgtcataaatgttgtgcgattaaagggtcgtaaaaggggttgatatcgtactatttatatgagacaactttatccgagatccaaccgcagtgacgaaattcattttcactgtccggtcagcgatcttcatacggacataatttgcatgggatcaggatgatgactcatcatacagaccaaaagttggaatttctgtcgctgtcagcaagcgaattggagcctaatacaacccggccgagtttatattcccaaatttactgtgtcctgcaaatcggttatttcaaagttaaacacgctttcttccgtttcgcttgtctgatagacagccagtcggtctacattttatttttagaaggataaaagtaaatgtcttatattcaatcgcatttgaagggaaggtgttggtttaccctcggtgacagtataactgaaagagggtggtatcaaccaatagtgaccgaaaatttaggtctaaaagaatggaaaaactacggaatagggggaacatgcctagcccaaaaagatgaaaatgacaattcagccatttgtttaagatatgaaaaaatggaaaacaatccagatattattacaatatggggaggggtaaatgattttggatttaactttggctcctatggaggggtggaaataggtgattataaagacaacacctccttgacatttattggcggtatgaagttattgatggctggaattacaaaaaaatacccattagcgagaatagggtttattataacaacaccaatatcagtacaaagaggcatgaacagtaaaaacgccaaagggtactacttgtctgactattgcagcgtttgtcgggaaatttgcgaaaaatattccatcccatatctggatttattaaaacaatctggattcaatgaaggaaatatcgatattatgaccagcaatagcttgggcacagtgtccgatggtttgcatccatcaaaaataggtatgaccaggattgccccaaaaatttcaaacttcattttatctatttaagagacaaaaaatgagaatattaaccatagatttattaaagatcgtttctatatttttcgttgtaatttctcacgttactttatttttcttgttgcgcaatgataatgacgtggttttgtattttcttaggcaggccggtcagttgggggtctcgttgttttttatgtgcagtggctatttcttactaaacaacaagcatgaaaatcaggtggattacatcattaataaatccaaagggatattaactgtattgttgttttggcttatcttttattatctgtatgacacatattttatcagtaaatttacaacagtgcctactgttaactttttaaattatgttaatgttagcggaactacatcagatgctacccatttatggtttatatttgcaattgtctctctatatatattaacaccactaatgcgtaacacatttaacgaagcaaatgcaaaggggattaagaaaatactcatcataatgcttataatttctaatcttacattgctgaatgcactaacagattacaaattctctttttccctaatcccattcaatattttgcttcctttccaatctgagggtttgattagtttcttgataggcggatatatagggttaacgaaacctaaaataaaggctttttcctgtaaacatataatacttatggtattttttcttatatcattgatatctttatcaatcatttcatccaagatggggatagccttcttttatgggaagttttataatgtattcctccaagcttcttcggtgtgcctgtttttattcttggttaacttgaatatcagagaaataccattcttaatagatgacattagcaagaatatactaggaatatatcttgttcacaatatttttgttattgaaatacataacgaattcgtccataatttcttattaacaaaatttaattacataaatgtatatatttacataatagcctattctttgctggcttttatcctgtcatatatattatgtgttttgctgcggaaatcaaaaataacatcaaaaattataaccatctaacgttattaacagggagagccggcttcttccagctatacccgtcatctttcaagttacttctttgttggctgcactcactcaccccggtcacatagttatctatgctcccggggattctctcccttgccgccgcgatccatcttgaaatccatagggtatatattttcttggtagtaaagtgtattggctaaaggaaggcgttttacaattatcacagaccacaacagtggtttgaaaggtaaaacgccttatgagactcccgttgagaaaatgagagcttaaaaatgctctgtcaatcgaagtcagagatcactcatcatatatttttataatgagttccaacactatgaaccgtcattgtattgtcagtatcattttgagtgaaggttaccctgtctttttggcttagcctcacactatataaattattcggcaatttttccaggttactgccgcttgctgtaccaatactttttgctgctgtctgtggagcgttacccttttgtacctcttttataaatgaactatacttttgttttgcagccccttccatattagaaaatccattcctagatttgttatttttaagttctttaaaactcactctccatttaggcgcttctgttggtccagccaaataacctattctgccatcaggtaatctctgcggtggtcgaaagaaaggtttaggaaacttttttctctcaatataattctctaatgatttagactctaatccattgtaaaagttttttgaaaaaatcctccttcccaatgaagttacagcagataaggtaagtaagaaatcaattaatttaaaaaatcttgcggcatttgattgttgattttcctccagtggaatttcctgtacagagaaaaaatatagtgctaataatttatcgtcatctgaataagcactcaatggtttattttcaagctcaggaacattccaaatgttttgaggatattgaccttcaaaatccagttcattcttataaaaaccatttgccatatctttagaaatttgatcaccattttcacctaatagtgcagatgaaagattagacatatattcttgataaattctctcagcagtctctttattcttataatagtcatcaggaagtttagatacattatgaataccacttacagccaaagcgtaagctaatattattttcttagctcgatattcaattccatatgatgctgtatgaccctcatctgtttgcttaaagtttagtatacgtactatatctcctgctatttgcttttcaacgggtggatatccacttctatcatcaggtgttaattgtataaccattatatttctccattatgttaatgtttatttgagctatgaaatttctggcagaaaactccgcaatttgtcgctactaatataaatttcaactttaaatatagagttttccctggctttttaagcgttaatttcaatgtaaaattaacttacgcaagaattattagcaagcttttctttttccatttctcgttgattttttttcatttaaatcattaggttaatattagttaaataaataatgaaatgagttaaataaaaacagaggacactaaaaataaattgaaccaatacggactttaagaataggataattttatgttaacaaaatatttttaatatagtcatggcgggttatgtaaatgtaagataatcattgcgtatggcaggaaataggcaattttcgatccttgttaataaaaaactcacctaataaataattttcattgaacgtttttttactaataaagccccgtgtaaacgaggctatttttgatatacaaggtcatatagattcaatacaccacggtgtaatatctcaactcctacggcgcgatataactaatttatccttaggacggtccacccaatcggagggattattgttgaagttatccgcaagcagataagacggcgttttagctaaccaatcagaaagtgaaatatcttggtagataccgttatctagcacaatcagtacttgaagatcatcattaccaatattttcgatatagtgaccaaatcccagtggcacataaccaacgtcggtcggcccatattttgcggtttgggcgtgtccgtgggaactaaacacggtcatacgtcctttgcctgaaatgtagtattgccactcgttggcattagggtgccaatgtagttcacgtatagcgccaggtttgatggtctcgatgaggccagtgatcgttgtagaaatggggaattccttcgatgatgctcgataaacactccctgcgtcgttctcgaagaagggtttgttcttcaagagttcataacggtgggtgagtggggcatcgtttaatccgccgtcatcggcgggtaggggaagttttggcgggatagcgccaccgacaatgtaagcttcaccctgtttgattttagaaaaaacagatgctggcatgttgacacttttctcaagcacctctttcggcatatgcgttatccaatcagtgatgctaaaagtgccaaattctgagaagtgtccgttatcaaaagtcagaataaaatgcgcaccatcttcaagcgcctgaatggaatgaccatgacctttgggaaaataccatacatcaccgggaccaaaatcagctacttcacttctgccctccggatcaataatggtaatacgtgcatgcccttcaagcatatatgcccattcagcggcaacagcatgccaatggagttcacgcacgccacccggttcaagcatcatgtcaacacccgcaatcccttcagatatcgggaattgttccaccgtagcttcccgtgcccatccattttctaatacccgttttttactatcggtgaatttatatttatacaaacttttagcatctgtggacggtttactattacccgcggcagccgtattgtgctgttcatcagcaacagccgttttaatcataccgcccatgctagcggccgccgcgccaattgcggatgccttcaagatatcacgacgagagaacatatttattgcctccaattaaaatgggtaccagcaagaatagttgcaagctgatatctatttgtttgatttttttaagttactggttgtcacggaaggaaaaattagaggtgactgattaagcatagtagaaaattagtcgtctagggaaaaccagagacaactctggttttcccggaaaagttattacttcatttactcttttttaccagagcaagggcgaacgtatttcataatgcagtcaagtttttcacaagtttcctgccactctctttctggttttgaatctctgaccaatcctgcgccagcctggagccaacagcgaccttgatgctgatagagagaacgtaataccagcgcagcatccagtttacctgagctatctaataacatgacacaaccactataaagccggcgtggttcaccttcataacgtgaaattgcctgtaaagaggtttttttcggtatccccgaagcggttacagccgggaatagggcgatgaacgcatcccaacgatttttgtctgtttgtagtaatccttttacccgtgatgccaaatgttgtactgaacctcgttcacgaatcgccataaactctgatacacaaagtgtgtcagcctgacaaatcggtgccagttcctctaatgccaatttagccgaaacagcatgttcagagatctccttcgggtcagaaagcaaatctgctctcaatcgttgatcctgatctttgtcatgtgtcaatgctctggttccagccaatggttgcgtgctaacccaacctgaaccatccgcttcaactacggtttccgggctaaaaccataaacagagaaatcttcatcacgtaagaagaaagagcgggcaggtgtgttagcttggcggcctaaccagtagctgtgtggcatgtcaatatccgagccaagttcaactcgacgtgacaggatcactttttgatagtggcccgaggcaatgtccttaaccgcattggcgacgttatcctgataacgtttcgccgcgtctgatgtactgataatttccctatcttttgtccacgggaaaacaggtgttcctaattgatcaacctggctaattttttccctcaatatggtgagttgactctcttcgagcgttcgtatcagaacctgtcctggagttatgcgtaattcatgctgtggaatagtgatttttatcaacgcttcgttctgttgtgctaatggcaacccatatgtcatatgggagaattcaaataacgttcttccataggcccgccaatcctgaatgggaagggcattaagcgcttgttcaagtttttggctcaacgtgctgatatcgtatggatggcgattaccttgtgaatcaatcaattgtcccgatgcatccgcactgatggtcgctgcacagcctatccccagtgaccattcacctttcacttcatagagcatataaggttgtgcttcgccttctgaaagcaaatgtgtgatcaaatctaacggagtgctggtaataacaactgtttgttcatgatattgctgcattgggcggccatgttctgcttgtgccatctgtaccaagcggcgtttatcaatttttcccacggtagtaagtggccaatatgggacaaacaaccattggtcaggaattttatgacgctgaacccctttctgttgtagaaatgccgctatctgcaccggttctggttgattgccgttgttaggtaaacaggcgcaggttcgttcacccagcaattcatcaggcactgaaatgacaacggcatcatcaatatcagggtgttgcagcagcaaggtctcaacttcttgggttgaaattttctcaccactgcggttaatctgctctttaattctgccctcaacgatcaggttgccatctgaggtcatacgaaccagatcgccagtacgatagaacccatcggtggtgaaagctacggtattatgctgctctgcacggtaatatcccgtaatagtgtaagggccacgtgtaataagctctcctacctcaccgggtactacaggttgtaaattggcatcaacaattttgatctcatcttcttctgataacggacgtccttgggtattaatgatgacctcgtggggatcatccaatcgggtataacagagtaatccttccgctgtaccaaacacctgctgcaaaggcccaaggcgtgctattacttgtcccgccagttctggtgtcaacctgccaccacctacttgcaaacagcgcagggatgaaagatcgctttgttcccagtcgcgagcctgttcccagagccgagccagagccggtactaatgctaaatgggtcactttgtgttgctcgattagcggcatggcctcatcaaaactggcggtatcactcagaaggacacttccaccctgggaaaggatacccaaaataccggggctgcctaacgtgaagttatgtgccacaggcagtacggccaaataaacactttccgtatttactgcgcacaaacgggcggagagcacaaaatcataggtataagcatcgtgagtacggggaatgagtttcggcgtaccggttgttccgcccgaaagcagcaatacggcaatatcaccataacttggagcgggaatatttactggtttatcatcaatggatgccaatgcggtaaattcttccgcttctccatcaacaataatgtgttttagatcggggcaaaatgccgcaatttctcgtgccatttcgcggtagtcaaaatcatggaagcaatcagggataatgtaagcaaccggacgtgcaatctggcaaagagcatgaacatcatgtgcccgctgtgtcggcattaataacaccggatgagcaccgagcctaaacagggcaaaacaggtaacgacaaaggagatacggttaggcagttgtaccataacgttatccccacgacggatccctcgacgaaataatccgctggccaatctctctgcggattggtgcaattcacggtaagttagttgttgttcttgatagatcagcgctgttttatcgccccaaataccagaccatccggcaagttgttggtccagcgttttgccattccaaaggtagtctggcgtcatagtaagtgttttcccaggaatagaaaaaggtgccattatgcgaactcctgtaaatagacatattgtataaattgtgtaatgtgacgaataaaattctcaggttcttgagtaatataaaaatggtcgcctacaatctccttgtggcgatatgaacggtgttgttctccgtctgcaagccattgctgccactgctgaacttctatcgcagaagcctctttatcttcactgccataaagcagcaatgttggtgtttgcagttttaccgcgtcagtctgaataaaccggtgataatgttccgtagcaagaaaatcagcccgtagcatcggtaagaacagcgcaagcaagccaggatcttctcgcaaaatcgggctacaaccgccgatatcaatcaattgttcaataaattcatgatcaggtaatccgctaagttggcggcgggattgaagatgaggtgcatggcaccccgaaagcaccagtgccttgggtgaacaattttgttgctcaaggcgttggcaagtttcaaaagcaacttgggcccccatactgtgaccgacaagtatcaggttctctctctgtgcgggggtgaatgacaccatcaggtcagaaagtgattgcgccaatggcacaatactggtggccgccttttctgtcatacggctgtctcgtccggggtaaatcacgagtgaaaccgctatatctgaattttctagtgtggaccagtggcggaatgcactggtactgcccccagcaaaggggcagattaacagcgtgtatttgggtttgccgtgagtcgtcaagcaaggacgaatcatcgggtgtgtagggagtgcccacgtcatcaacattcttccttagttaacatcaattttgctggctcaatccaaacagggggcgataaatcctgagtaacaggctctcccataatgcgcaaaatttgttgccataaacctgctagccgcagttggtaatcgtaagcaaaagccggtgggcaaagggcaccgttcaatacagaacctaaggtattgagcaaaaatgccacacctttagccccatcacattcaaatgctgtcatccagtttttggttgccggacaaagaatttgtgatgtcgcttggtacagatagttatcatccggctgactggcattcaggtagaggctttgttcgttattcagatgatcaggtgcatgaaggacgggtgtccagataaccggcccgtaactggcttcctgcgtaagataaccgacaggccagatcagcgtcattttatgcatcaccagattgtgcatatcgggatctcttgggtccagataggattgcacgtttaatgttacggttgtcccttcgaagctaagttcaaagcaatgaaatgcaccgcttcgctgaccgacataaactatctccatctgttccggacaatgacatgcctgtaacaacagatcgagcgcagaaaatagcaattggcgactggttgtcaaataaccacttaccggacgttgctgtgataagtgagtgatttgccgcgccgcatgtaaccaacttcttccagcatgacattggctataaaagctatttacccaaaacattgcatcatgtttgttggcggttaattgatgttttttgatagcttcggcatcaaggggatgttcctgaatgacagaaattccacgcgccaaaagtgcctgagtgagctgatcgcctttgccgccaataacctccgcccgtattaccacgcaggcaatatcaatatcatctggtagttcatccagtgagcggaataggggcacattaaaatcacaggcaagttgctgcgaacgagcgctaccctgtgccaaaataccggctaattccagaccagactgaggttgtaagaacgcattaagatataattcgccaaatttcgaaccgacaatcagaacccgccgtggctttatcatatgttctccttaacaagattagtggttgatactgaattcaagatatctttcatacaggtaaccagtgagccaacatgttgatgttggaacaaggtgtaatgatcacccgcaagttgtgtcacatggactggcccaaaagcctgccagccaagatcgattgaggcgatggtggttggatcgagataatccataaaatcaggtagtgcctgtgctgcccgaataagccagaaaggctgtgaagtctgcggtggacagtaatcaagcaacgcatttaagttatggtgccacacgtcataaagtgcggtcagcgagctatcaatctgtgcagattgtggcaaagcagcgtgcaacgtattaaggaaggtctccgtatcggcagcgataacatgatcatccagagtgagaccggggaattgcccctgcaaatcgagcaggaaatgacgatgacaaaatgtttcattcagcgtcaaatcggcccgcacatttggcgcaaagctatcaattaggatgcattgagaaatgcgttcacccatcgctcgtaattgatgagccatttcataagccaccaatccaccgaaagaccatcctgccaaagcataaggcccttgtggctggaaggcgcggatttgactgatatagtcagccgccaacgccgccacggaaggggtatctggagttaaattatctggcgaaaatgccaacccaatcatacgttggtcaccgaaactggccgctaaatgacgataccctaacaaatgcccgccaataggatggacgataaacagggcaggttgctcaacgcttcccttgttcaatatcaccccttggcaaaggctttctggctgatgttcaataaattcagccaaagagtgtacggtatcgtaagtttgtagcagactgagcggatattgacggttaaacgtctgattgattttcaccattaaccgtaccgccgccagagaatctccacctagcgtaaagaaactttcatgcacaccgatagcttgttgttccaatactgattgccaaaggttcaacacagcttgtgctgtcacactgagagcaaccgacgatgcaagattgacttcctgtgctgccacctcaaccaaggtagctaatgcgcgtctgtcaattttgccgttgtcggatacagggatcgcatcaagaatgataaatcgctgtgggcacatccaaacaggcaaggtctgttgcaaccaatgaggcagaaccggtaaaagttctgtagatagcggggtttcatcagacaaacgcaaacccgcgacaagttgcaatgcaccggttgacgtagtatgtgcaaacgctaatgcttgttgtatatccgggtgctcgcataagcggtgttcgatctcacctagctcaatccggtagccccgaattttaatctggtgatcattgcgccccagaaactcaatattaccgtctggccgccagcgacctaagtcaccggtgcggtataaccgttcaccggtttgaggatgggtaataaaggcttgggcagttttttccaaatcagcccagtagcctaaagctaacccttgtccaccaatatagagttcccccgttacccaaaccgggcagggcgaaagcgttgcattgagcacatagaaagtctgattagccagtggttttccgtatggaatgctgcgccagtttggatcaacctgagcaataggataggcaatagaccaaattgatgcttcggttgcaccgcccaaactgagaagattcaacgcagggtgaagagcagataatctttccggtaaactggtcggtatccaatcaccactcatcaatacccaacgcaggctattcagggaatgtgggtaatctctggcgtattcctcaagcagttgtacaaatgctggaacagagttccaaactgtgacggattcttgttgtaaccacgtcaataacttgtcggggtgtcggctgtcaccgggagaaggaatcaccagttttgctccacaacttaaagtaccaaacagatcataaactgaaagatcgaatgtcaattctgatatcgccagtacgctatcgtgttcattgagagcaatgcgttggttaatatcaagaatggtattaaccgcaccttgatgatctatcatcacgcctttcggtttgccggtagaacctgatgtgaaaatcacataagccaaatcctcaggatgggcagacaagcgttgtccaccggtatttttcggcaagcggttaagtaatagttcatccagcgagataacctgtacactatcaggccaactcatttgttgagcaaacttaggttgagttaatacagtatcaacttcccctgatgccaatagctgatggatgcgctgttgcgggtagctggcatcaataggcaaataagcccgtcccgccaataaaatcgccataaccgcaacaatctgttcccaacctttttccatcaccacgccaattagtgacgaatgctgatgttcttgtgtttgtagatgagcagccagcgccagactttgtgaccacaaagtgcggtaatcgatttgacgataagcatcaacaaccgcgatacgttgtgggtagcgatttactgcctgttcaattaacgaacaaagcgtatgggaaggaaagacacgcgttgttgcattactgttttggcacaaaattcgatcatttaccgggagccactctggcagtggtgcgctccattgataatcgggttcaagcagggcggcgacgctagcctgataatgagcaaacatattttctgcaacttgtggctggaacagttgcggcaaaattgcccattgaatgataacgccaccctctgagccagaaatcagcatacagtcgagataaacatgcggtgtttgcgcaccaaagagattcagcgttcccagccctgatggcccccgacccgcagtgccggttgtatcgttgaacacgattggcataccggcgtttagattgtgacggtgctgatttttctctctgagtaccagttgtccatcaaatagagcatgttgcagatctgctaaccactgtttctgtatctgacttaccgcatcactgaatccagtgatatggcgtaaatccacttccaacaatgatgtagtggacagatttccgaccaacgtatcgcaatgttgcggcattaacagtcggttgccatgcagaacattgatggtgaaatgctcgctgttgctccataccgccagaatatgggtgaataatgtcagcataacctgtgatggtgaagctcggtattctgctgcgcgttgttgcaaacgctgccattgttgcggactaatatatcccgtcagacattgttgattaagttcttgtgactgatgatcttttagtggcaactctggagcatcaggcagatagggtaaacgattaagccagtattgtcggctttgctgccaagcttcccctgttttctcatcttccagtgcttgaatatagtcactaatagttgctgccggtggttctggctgccagttaggttcctgatatccgcgttgcaaatcgcgtaggattaatgtcaaacttttaccatcagcaaccagtagatcgatagtcaaatgtaataagtgcgtccggtcatcagtacgatatagcgtcaaatcaaacagcggccagttatcgctaggaacacctttagtgcgcaggatatcgcgggcatccgcgagttttgtctcgcgttgagcaggcatcatgttacgacagtcaattaccgtcggggtatagcaaggcacttccggcagaatatgatattgcccatccttcacataaccacgtaattgcgcatgatgactcaccacacggttccaggcagtaatgaagcgaggcagatcaagatcgttgatagccagttcagcgtagaaatgcgcgataccgttaccaaactgaaacagttggctttcgcctaaccaataagcatattgcaacgcagtcagtggcagcgtttgctccgatgctggcttggtctcaattggaacagcctgtgtagcgagtgttgtttcaactgtttcaattgtccgcaaagtacggcaaaactcactcaacttcggatgttcaaaaagctgttgcagatttgcctgttcgtaaccttgacgacgcaattgcaccaccatccgggtagcaattaagctgtcaccgccactttggaaaaagtcactgtggcgctgtattggctgaggaagcagtgaacaccagagcgtgattacctgctgttctatatcatggagctggtcatcttctgtttccggttgtactgcttctggagttgatcgttgtgccacgctctctttagcagccacgatcagcggtaattgttcttgctgttgaacatgcaatgagtaaggcaaagtagaaaattgtgccgctatttcactgacattgagccgtgcttgccgttcagcccgcgccagaatcagttgttgatgcagttctggcccatcttgccccggccattccaatgaaacccgataaccggatttctccaggcactgacgccagtccgcaagatccatcaatgcactatcgccgcgatcatcactccaggcattaataccttcaataaatccgacactagcaagttgcatagcgctttcgcgtttcgttgattcaataatcagtaaccatccaccggttttcagtaaccgtgacaggcgctgtagggtgttttgcagatgagttgcatcatgcaacacattaaccgccataatcaggtcataaccggatgcaggatgttggctaaaatcaatacgctgattaatatcgaacagcgcaaattttacggtttcgccatagtgattaagcaactggcgggcatcatccagaaatagcggcgaaacatcggtaaagtgatagcgttcaatcgattgtgcattgtgttcaagcaccttcgctgaggttgcaccggttcctgcaccgacttccagaacagtgaaatgctcagatacctgactcaattgccggacaatttcagcggccgtttggttcaggcatcgtaacgcgggattctcactatagaggctggcagtgatctgtttatcggcaaacagtagttccaacgcattacttcgtccggcaagcagggcatcatgttgctcgatacatgtcgcgatataacggctaatcgtttgacaccacacagcattgtccagttttgccgtaggagcaggaacacgattaagcggttgcaaacaacggtatccatcagcagttttttcaatcaatccttggttgtttaataacgtcagccattgggtaagaagacgctgatactgtggcgcaagttgtaaatgttgttcaatctctgtgcgagagtggcattgctgaggataagtgaacagattatggcgcagtaatgtctgactcaggccaaataacgcttgctgctcaatgtgctgccaagagcgctcaaatgcctgttgttcagttaactcaggcagcggtaacttatcggtgtttatcgctaatggttctggcagcgataatgacaaattgtcctctgccaccagccagaagttataaccttgcgtgtcatcctgacgtggctgaatttctgccaaccgtatttcaggtttggcacgcaaatattgttcagcttgatgcaattcaggttgttgcggccagaagtcataacgggtatgaccggaaggggggatatgaagatcatactgttctatgcagtcaggctggcagcaaatttgcactaacagcgcattataagcggcaaacagtgcctcaataacccccggtgctaatacatcatccatgcagtaccagttaaacagtagatcgccatctacttccatgacttgatgatccagccagacttgcggggtttgactcagaacaaaaaccgggtctcccagtaactgagtgatcgattgtttgatggcgacgccttcttgcgccattcctaacatgctggtgaaaaccaccggcgtcagcggttgtctgctttgagtttcaccattttgttggcggccaagttctcgcaatacctcaacaccattgacatagttatggctcagccgttgccatagcaaagcttgtgttttctccatgctggcacgcagggaagttgccttacgtaaatcaaaatccatcaacatgactgaggtaaaatcaccaatcagatcttgaacctctggatggaaaggttgccggttaaagaatgtcaggttgagagtaaacagcggatgacggctataccattccagagtatgagcaaacagcgtcagcagaccggcggaaggcgtcacaccccattgttgccagcgttgtttaagcatttgccaatcagattgtgctaatcgaccttcataagtggtgaattgtggctgacgacgctgaggcaattgtggattcagcggcaatcttggtgccggaggcaacgaaggtaattggtgctgccaatatgcccatgatgcctgccactctttacttgcccgttgagcttgttccgccatcacatagtcacggaaagtaaacacctgcgggatcagtggcttctggtggtaagcgcgttgcaagtcgtccatcatgattcggaaactctgtacgtcaaactgcaacagatccagattcatatgtaagcgacaacgtgcattcggtaacagagaaacagaaacttcaaacagtggccactgttctgccggcgggacctggtaagaaagcgtatgacgacgctgaaccagtgcctgttggcaagctgtttcatccagcatacgcaaatcatcttgtgataaagcataccaaggggtttcaggcagaattctttgttgcccgtcttcatccacgaccatgcgcaacatgccatgacgctgaattaaagcattccatgccttctcaaaacgcggaatatcaaaacgatctagtgtcagatcccattcaaataggacgtgacacgcaacaccgccaaaatcaatggcctgagtacgaccaatccagtaagcgtgctgaatgggcgtcaacgggaatggagcatgacgttgggcactgtcaataatgatctcaggctgagagccggttatttgttgttcaggtaacgcgtcgccaataagccgattaagcccctctaaattcatattctgataagccaattcggcagtgagtctgaaaccaaattgctggtggatcactgcatttagctccagaaacaacaaggaatccaaaccaaattgcagtaagtcctgttgcgattccaaacgttcaggctgttctaaccgcagcaatgcagcgacacgttgacgcaaccaattaagccgttcttcactgtcctgatacaacgtgttatcgacagagtgtgaaggtgccgggggtgccactgggtggttatggtcagtatcagcctgtaaacgccgcgaaatatcagggtgatgctcatccaaccgtatcgccagataacaaggagatgcactgcgcagagattgattaaaatgccagataccttcattgacgctgaacggtaacatgccatcttgtgccaatttttccactaatcgccgctcgcgggccataccaacgccaccccaaacaccccaaaccaatgcttttactatcaacggattcggggctgtcagcgccaaagattccaggtaagcattggcaacggcataagcaccttgtccttgagcgcctaacattgatgcggcagaagaatgaagcaacagatagtgtgcattatgttgcttaagagcagtttgcaacgccgatgcactcagggcttttaccgataacatctgtgacagacattgaggttcaagttctgccaaccgggtatgatcagcgatacccgccgcatgaattgccccggcgataccatcctcttgtgccagcatctgtactgcatttaacaaagctggcgtatcagtaacatcaactttaatccagcgtatctcacattcagtattcagtgatgactcttgaacaaaagtgccccaatccgcatgttgacgacgggcaaatactgcaattctacgtgcaccttgagccaacagccaacggacggaaatctgaccaatccctcccattcccccggtcacgatatgccaaccctgatggggaatcgacatcggctgttgagaaagccgtaaggattgacgttgtaaaaccggcaccgaggcttgattgccacgaactctcagccaacggttatgttcactcaaatagccaagcgctaatgacaaagcgtcagcatcgttgatatcagcaatatcaatcgcttgaatacgacgatggggatattcttcaactgcgacacgtaacaatgcccagacagcatattgagctggattgatattctctggtgataaggtggtttccggttgagcgccacaggtgacaacggttaatggtatttcttcatcacgttttagttcggtaataacctgatcgcataattcaagtacatcactgccggtaagcagtaataagatatttccgctttctggctgtaaatcaatacccgcctgacgccaatgattaactatctcgtcattcaccgttgaagaacggagagtatatgccgttgaagatcttgggttatctgtgtttattgtacgccagtgtagggcatagtgggtgttgggacacggttgtggtgcgggaagccatgagttggtcgcagcttgggttgatacaaactgacgcggcagatcacaacgatcgcttaacagggcaaatagacgctcacccgcataaatcaaagccggaaaagcggtgaataaacgtgactctaataatctgcgtttggcatatggcaggggacgatcagggcaatacattttacttgctgttggcccagaaacttcccggtaataaccttgctggacgcaataggttagcaattgttccaacaaagggcaccaacgaggttgcagacgaccagcccgaatagtgtcgatagcactgaaaccttgttcagtatcacgcccatgacattgatataccaatgcatcggtatacaactcacgtagtgttgcagcatcagggttttgctcaatggcaggatcgagcagagcatttacatcaagtccagcattgatattggttgtgggctgcacagatttggttgcagggaagcgataatgctgctcatcaaatggatagagaggagcatgacatttttccccagtaagcgagaaaagatgcggccagtcaagatgcacaccagcacagtaaagttgcatgagagccgtttgctgagctgtctctggagagttttgacgctgtatgccagcaatccaagattcctgtggcagactgacccgtcgcccgatgccagttaattgtgcatcagcccccatctccataaataatgccaccccttgctggcgggcaaactcaacagccgggtaatagcgtacggtctgacgcatatgattacgccagtagtccggtgaacctaattgtgccgccgttgcaatattggcggtcagggtagaaatcagcggaatttcccccaatgcaggttgcaactggctacaacgcagagaaaatgcctccagtacaccatcaagcatggctgaatgtgctgcacaggcaacgtttagacgttggcaacgaatctgctgttgttccaagcgttgtgccaaggtcgcaatttccgtctctgtaccggcccaaacccagtgttgtgggccattgcaaaccgccaaatctaataccagcgaatgaacgaacggaagtacttcttcctcattggcaaaaaccgccagcattgcgcccccttgggagcagttttgcatcagtttgcctcgtaccgccacgagcggcatcacctgttcaggtgtgaaaatcccggcaacaacggcagcggcaaattctccaaccgagtgccccaatacataatcaggctttaatccaagtgcctgccaatgtgccgccagtgcaatttgatgcgccacaattgccggttgtgcgtattcggtggtggctaatgcagcatcatgctctccgaacatgactgcttttaatggcaatgccaactctgatgcacaggctgtacagcaacgatccaacatagcggaaaaaacaggagagctggcatacattgctttccccatgccagaccattgacaaccctgaccgctaaattgccaaagttgtttactttcgctattgatttgcccactgaaaacattttgtgttggtttcttgttggcaaaagcggataaattttcagcactctgtggcgttagcgccaatgctaaacgccagggtaatgaaaaatcacgtccctgtaatgcggtccaagccagatctgcatgatgctctggtgcaccattgagtgcagccgcataacgttgggccaattgacgtaatgaaaattcagaagcagcagagagcaataaaggcgaagtctgcgcatgatggacacggtgacgacgtaattcttccggcaatgattgcacgacgacatgacagttagtaccaccaatcccaaacgaagagacgcctgcggtacgtaatgcttgtgtccagcgttgcccttgtgttgccagcctgaatggactttgttccaaccgtaaagccgggttgggttgctgaacattgatcgtcggtggaatatagccatgccaaacagacaaaaccgctttaatcaagctagcaatgccggcagccgtatcaagatggcccatattgcttttcactgagccaagatagcaaggcggtaacgccacactacgatcagaaaatatgctgcgtagcgcgtcaacttctatcggatcgccaagaggcgttcccgtaccatgtgcttcaatcatgccaacatcatcaatgctgacatcagccagttggagtgcttcgataataacgttgcgttgaccgttgaccgaaggggcggtaaagccaactttctcattgccatcattattaattgcactgccacgtagcacagccatgatgggatcgccatcgcgcagagcatcacttaggcgttttagcgtgacaacaccaacgccattgccaccataggtgccatttgcctggctatcaaaagggcggcaatgcccatcaggggagaaaatcattcccggctgatacaagtaaccactttcttgcgggaaagaaactgccacaccaccagccaacgccatgtcgcactcaccggcacgcaggttttcacaagccatatgcacagcaaccagtgaacttgaacacgctgtttgtaccgtcagtgccgggccttttaggtttaatttataagcggtacgtgtcgcaagataatctttatcgttactgattaacgcttgaagccctttaactttgccaacatcggtcatggaaaattgtgaccatgaaggccaagtactgacccggctgctaccaaaaacaccggttttcaacgggacatgacgtggcgcataaccggcatgttcaagagcatgccaagcggtctggagaaaaagacgctgttgaggatcgagcatctccgcttcctgccgtgaataaccaaacagcgaggcgtcaaattgttccgctttctctaatatcgctgcccgattgacaaaattttcactctcaatgacttcaagaggaatacctgcatctaataatgtttgacgggagagtggaacagtacactcagctccgtgttgcaggttatgccagaaagtatcgctatctggtgcctgcggaaagcggcaggcaaggccaatcactgcgacaggatcgcaattatcgtaatgagacgttaaatcagtcattatgcagctcctttatgacgtttttcccgttgttgcagacgcttctgttgttgacgctgacgaggggtaatcgactggcgatttccgtcgtgggaatccttccggcagcgcaaactgagcgtctctggtgttggataagcaaataaatcggtcacggcaagatgataaaaacccgcatgttgtagtttgctgtgcaattgaattagctgtagcgagctggctcctgcctcaaaaaagttttgttgtgcgttaataggatgatttgttatggacaagaacagacgttgaattttactgcatatttgagggtcatatccctctgaacgcaatgatggcgcaatggcaacagcagtattttcaaccatcacggattgctggcgtggcatcaattgttccagtgctgcatgccaactttctggctgagccgcaagggcacgcaatagcgtcatgtagctattgaacatgttttgcaactgatgtggttcaaacaattcttcgacagcatcccaatttagacaaagttcattatcagattcataaacctggtgatccaaccagatttgtggcgtttgggaaataccccaaacgggtttcatccacgatgaatgcgaaaggaattgcccttggtgtgttcccaatgcactggtgaaaacgaccggcataatggccgcatcggcgctacggctctgtaccaattcacgcatcactctaattgctgaaatgtgacggtgatctagatcctgccataactgttgttgcaatctacgggcacttgataaccaatttttctccgggtgccaggccagtaatgacagagaagtgaaatcacccaaaatgtgattgatatcttcatgccagtgtgggcgatcgaacagagtaaggttgagcgttaactccggtttagtactgaacgcagaaagaaccgctgcataagccgcaattaatagcgcggaaggcgttatttgataaggagctgcatgttgtttcaactggctccattcatatgcagatagccgatcgctatagcgcacaaaacgtggcgattgaaccttttccggggcaatacgcagtggcaattgtggtgccagtggtaatgttttcacttgctcctgccaatattgcagcgaacgctgatgtgctggtgcctgttgctggcgtagtacacaatcccggaatgtgactttcaatggtggcaattcatgctgctcgtcgagataaagctgttctaactcggccagcaatatctgcatgctcaacccgtctaatagcagattatccaagctgacaaatagccgggagacaatcccatcatcttgcgcaagctgaaaatcgaacactggccagctactggcatctaatacttgatgcgaaagctgttcgcgtaatgtatctgcctgcgtaatattggtgaattgatgttgtttgacggagaacagcgggacattttctaatgcctgttgctgcccattgacaaccacggttctgagcatgggatgacgctgaatcagacgatttaacacccgatttaaacgttgaacatctaactgctctatctggtattcaataaagaaatgcgcgccaacaccacttaaagcgaaacccggatggcgtccgaccaaataagcctgctgaacttccgtgagtgggaaaggctggtactcattttgctctttcggcagagcgcactctgttgatgaagtttcagccagaggaaccagtgtagccgcaaatgctgccaattgtgggttacggaaaagatggcccagctcacctttaaagccttgttgtgtcagttcaccaaccaaacgcgtagccagaagactatcaccgccaagttggaaaaagtcactgtcacagcccagttgttctgtattgagcaagcgttgccaaatgccggcaacggtttgttccaccgcattcaacaaggccatttcattctggcgcggtgctgtctctgtttttatcgcagactgtagttcttgcgatagcgccttacgatcaattttgccgttaggtgtcaatggcagacgaggaataatatgcaagcgctgtgggatcatatatcccggcagatgttgtgccagcacagacttaattttttcccgatcaggaatagttacgctgtcacttgtttgcatcaataacacactaaggttaccgatggtaattggcgtttcagcctgtagtggtagtagtggtaatagttgtggcaataacaataaccactgtgacgcagaacgtaattgaataccttgaggtgaaagcaattcagtcgtaatcagggaaagagacgatgcctgttgcaactccattgccaatatcaacgcgccgggttgagcaaatggtaccaattccttgagacaacgtgcaggatcttcttcccggtgtaatacattattcagcagaataatatcagcctgatgttgcagcgattcaggaacttgtttagaccaaccttgcactttagaccaatattgtactgatgcatgagcataaccgcttaaccgtgtttgcgcctgattgaccagtgcctgagaacgttcaaagccgagataacagagatgctgatcagtaatatgctctgctaaccactgcgcacagcgaccgctgcgagcatcaaactccatcaaagtcacggggcgttgtaatctctgagagaggatggtgatgacttgttgcaacccggtcagccactgctgggtttctggcaacacaaacaattgttgttccggtgcgaattgcggatcgtcaagtaatgcaaccgccgtctgttgcccggtaagaacatcgcgtaacacagtgtgccaacgttccgggatacctatcgcctgatcattggatgtagcgggtaaccatccggcctgatatatatacggtgtagattcaaccagtaccttacattggcaaagatatgccaacatacgggcaaaccagtcatgatactccgcttggggctgatagtgtttcaagcaatctgtcagtgactgcggtgaagtaaaggtaataccgtgacgagatagatgttccagcaggaacatggcaacttgaggttcactgctatctgcggttattgcatgcattgcggggaacagctcacgatagccagcggataactgcggtgcacgattgatccgttggcataaagaatcaccttctaattcaaggaacgccactagcgacttctctttttcgccactggcgagtgccactcctttactaatcccagtgacttgattaagggccgcatcaatttcccccaactcaattcggtaaccaccaatttttacctgactatcacgacgtcccagaaattcaagccaaccttcaggatggtaacaacccagatcaccggtgcggtaccagcgttccccttgatcgacaacaaattgagcggaagtacgttcttcatcattaaagtagcctaatgcgacaccggagccaccaatccaaagctcaccgacaacccaatcagggcaatcacgaccatcttcacccacgacacggtagcgctggttagctaaaggatagccatacggaatggagcgccactgtgcttcaactgctttgacgatatattcgtttgaccaaatagccgcttctgtagcaccgcccattgcactcaaaacaccatcaggattgaaggcgcggtaacgttcaggcagtgacaaaccgatccagtccccggacaacatcacagtacgaagtgctttcggcgcatcgacctccatgccttcgcaataggtcagtaacatatcgaacagtgcgggcacactattccacaacgtcacatgatgacgcgcgatcagcatttcccaagttgatgggtcacgacgctgtgcttcattaattaataccagcgcacctcccgcggtgagaataccgaaaatgtcataaacggagaggtcgaaatgtagagcagagagtgccaataaccggtcgctactttggacctgatgacggcgattgatatccaaacaggtattgagtgcgctctggtggctgataacgacgccttttggtataccggttgaaccagaggtatagatgatataagccggatcagtaaccgcacgcttaaccatgtttgccaaaggcggccattgctcatcctgatgccaagaaacacaatgcacatcttgtgaccagtcatcaccttgtttttcaagatcaatgtgttgttcaggatcaatgataacgacgcgaatcccagcactttcgcagatagcacgacgtcggtttactggctgatcaacaggaaccggtacataaacgccgccgatataaagtatcgccaataccgcaacaatttgtccgacacttttttccatgctaatggcaacccgatctcccggtataaccgacattttttgcaacacggttgctaaccggcgagcggccaaacttaattcaccataactgatttccttattattagtcaccaaagcaacaatatttggtgtgcgttctgcctgcaaaaacaccccttcatgcagaagagcatccggcaaaggttcagttgtgttattgatctgataccgcagttggtattgcgatttaggcatcagatccggtaattctttactccactgtgtagcgttttccgttaaatttccaatgaacccctgataggcagtaaataaggtatccattaacccgtcaggaaagagttcatcgttactatcccactgaatattcagcgtgttttcatgttcaaatgcaacgaaatccagccatacctgaggggtttgtgatattccccaacttggttttcccagaacatcacgggtattttcaccatataaaggtcgacctaaattgctggtaaacacaattggcgcaccatgtggatgactaccgcgttttttaagttcacgtaaaacttctacaccagaccaatggcggtgttcgtaagcttcagcaaatgttgcttgcgcgtcttgagccagttggcagaacggcaagttatcagcgggaatatctaacagcaaaatattagtaaagtcggccaacaggttgtcaacttccgtgtgcaatggcgctctgtcaaacaacgtcaggttaaacaacagacggggagcatgattccagcgacataataaaccggcaaatgcggttgccaatgccatcgttggcgtaacaccattttgttgagcaagttgtttaaaacgttgccaatattcaggagccaaacggaagcatctgcgctgaatgcggacgttttttattagggaaggttccttagccagagggagttgaggggcagggggaagggtatctaaccggttacgccagaatatctctgcttcttgtcgagcctgcgcaaattgcgcctgatattgcaccaaatagcggcaaaaatcgtagtcagaaggaataaccggcaggttgcgtttaacaattaatgccgccagttcagtaaagaacaggctaaaactggcggcatccatgatcagcaaatcaatattagcgtgcaaccggtgctgattctctccaaacagacttagctgaatatcgaacgtttccccttgttcaacctgtaatacccgatggcttagttgttcacgtatattattcagcgcttgtcgctgttcttctgctgtaaagctgcgcaggtcatgaaccgttaattttttccaataagcatcggccatcccttgctggcgaccatcgggcaaaaaccgcactcgtaacatcggatgtcgctgaatcaacttatgaattgccgcttccagtggttcaggctccaacccgataccgtcaaattcttgatataaatggcaaccgactcctcccaatgtctgttctggcgaacgcccaacaaaatacgcatgttgtaccgcagtcaacgggaacggacgagcatccgcaatcaatggctgcgccacatcaggcttaagtgctgtatgagtaacaggcgcatgacgttgcagaagctggctccaggcatacagtgtgggtttttgatacagttcacgaagggtgacgcgatatccctgacgcctcaactggtttaacaatgccatcatttgcattgagtccagccctttgcgaattaaatcatcgttatcatccaccagtgtatttttttgagtaaacaggccagatatgatctgacgcagtgaatctggagagacaaaatccttgtgcatgaagatatcctataaataataacggttacgaagcggtgggggttacaccttatttggcttatttggatatagatgccagtgctcttctgagccgagatggttttcccaaagagattgataaagtgaacaacgcgctaacaattcgtcatgagtgccgctatcacaaagggttccatgatccatcaccaatatctggtcagcgcgggttatcgtgctcagccgatgagcgataacaaaaactgttttattccgggtaagagaatcaaacgcctgttgtatcaactgttcgttttcgggatcgagagaagccgtcgcttcgtcaaggaataaaaccggagattgctttaaaatggcacgggcaatggcaaggcgctgacgctcgccaccagacagcgtaccgccatccacgcctagcggagtatcgtatccttgtggtaatgccaaaatcgtatcgtgaatattggcaagacgagctgcttgttccagttctaattgggttgcattgggatcacccaaccggagattgttagcgacggtatcctgaaatagtgcggtttcctgaaataccatagtcacggtgtcatacaatgcttgggtttggtaatgatggatatcatttccacccagacggatttctcccttatccagttgatagaaagagagtaatagataagccagtgtggatttcccactgccactgggtccgacaatagcggtcatactgccttgcggcgcataaaacgacacattttggatagcgggttgattggtacctggatagctaaacgaaatgtcattaacttcaacatcatatttgtctggcgcagctagtggcccggaagcttgcgttgcaacggcttctatctctgcaatatgggtttcacctacttgcgttaaggccgtaatattgagtaaggggatgatcccacgtagaggggtaatcgtggcaaacaacaacagaatagtgataagtatttctgaaagtgttaatgcttctggtgaattaaaacgcagagcaccagccagaatgccaacgaccacgctggtatcaatgatgatgtaaaacaggctcagtagcggaatacttctgaataccccgcggcggaatgcgacacgtaattggtcgatttcgcggtcaaaacgctgttctaccgtcgtggttgctgccgcagcacgaataaaggacataccttgggcgtactcaacgatagcttcggatacctcagccatcatagtggcacgcaagcgcaatatttcattcagttttttacggatagctcccaagatgaacattccaaccatcagcactaataatgcactaccggcaaccacccaatcgaaccagaataaagctaagtagatgagagtcagcatcatcacctgacaagcgatttgcggtgtggtataggctgactgattttcctgccattgcacatcttcagataacgtcaacgctatttttccagcgctcaatccccgaatagtggcgacagacatactgacaaggcgttgtagcagagagcgacgaatttctatgcctaaaccataggcggcaatggtgagtttacgtaatgcgcgagccataaaagtaaatcgcagcaacaataaaataaccagtaatcccaaagtgataagcggcaacataggattgtcactttcccctagatgggtaatagcccaggcagcaatagccagttgagccataatcgcaacggtatcaaactgtttatataacaatcccttaaaccaaactctttgtagttttggtgatagatgttgctggagacgattaaatagccccatgataatttgctcctgtcccggttttttctccccgccaagcagcccactgtctggcgtatgcaccttgctgtgcggccagttcatcatgggttccttgttcgataatctgtcctttatctaaaaccattattcgatcaagatgacggatagtcggtagacgatgggcaatgacaatcacagtcttattgcggcataaggcattgagtgcctgttgcatctctttttcacattctggatcggcataggctgtagcttcgtccaatacaagaattggggcgtttttcagaatagcggcggcaacggcaatacgctgtttttcacctaccgataaactcacgccaccgttcagtacggtgtcgtagccttgtggtaattgctgaataaattgatgagcttgcgctgcggtagccgccgtttcaacttcggccagtgaggcattaggacgggctaatcgtatgttattagccaccgtatcgttgaacagaaacacccgctggaaaacaaaagagacgttattgcgtagcgtcggttcatccatattacggatatcaacaccgccaatagtcacctgaccatgctgagggtcccaaagacgtgcgataagactcgctacagtagatttacccgaaccactggcaccgactaaagctaatgaactgcccgccggtatagaaaatgaaatgttatttaatgcattcccctgcttatcttggtaggagaaactgacattgtgcagggcgacgctgtgatcggcgggtgtttggctttgggtgcaaggcgctagttcaggttgattcattaaccaacgataacgtgtgatcaacgcctcttgctgttgcaaacgtgtcatcacagcgaacatggatgaggcaatattaccgaatgccattgccgccaaaataaagaaagtcaattcgaataaagtgatctcttgtcggttcaataaccagaccgccaaagggaggacaaacaacaggttagcactggataacacgaaaaaccggctggatttgacctgcactttctcaacccaaacgtcaataatccgagtcagggcagtaaacgctttctcagcgcgttgcaacgcaaccttgccgcctgaataggttttgaccacaggaatcgcattaataacttcacccattgttgaagcaatacggttttgggctgcataaaaacgctgagttgtcgtttgaacttttatctgaatatagacaaataacaagcaggcacccaaagtcggcgcgaaggccgccaaggctaaccgccaatcaatggctaacatgacactcaatgcgatcaatggaccaaataaggtagcagacatctctggaatgatatgagcaataccatcttcaagctgttcgacgtcatctagcatcatcttttttatttcagtgctgtcggtcagcatgaaaaagcccaaaggtacagacttcaacttactgctgatattgcggcgaacatcagcttgcacatcggcagcaaccaaatgagcaaaaaacgttgaaccactaaaggtcaacatagcggcaaacgtgaatcccaataacataacgccataattcaatagcgtgtcatattgcccgtcatagatagattgggtgatgagcccggcaaccgccgccggcaatatttgcaggccggcggaaagaatggcaagtgcaatagcaacgtaactcaacgtgcggtatgggcgcatcatgtaccataactctttaataacgccggcatcagccgcacgctgctccggcgaactctgagcagaagtatcatgattacgcattcacgctctccttgtggaaattatggaacttacgcaatatccagaacaaggcaatgaaagtgaagagaagtgcaagaacgaaaagggcagaatagcctgctttagtaacaatcaatccacccaacactgaacagataattgcaatacccatatctgcggattgcatcaatgcaaaatccacaccggactgagcacccgcggcgagcgacatcatctgggtatacagcgcaacaaatttggcggcagtgattaaggtgatgaaaacatatgcggctgaaagcagggataacggcgcttctggttgccgggcaagccagaaaataccggctaatacgatagattcaagcagtatgacagacagtaaagtctggacagcaccgaatttacgtacaatgatgccaccaagcagaacaccagataatccagctaatgcaccaccactggcggcaatgataccaagttgagttaaatccacaccgcgatcgatcaaaaacggcgaaagcataccaagtgaaaggcgcgtaccgatcatacacagcaatatcaaaaccaatgcttgtctaaccggtgcccgacggagtgcatttttgagagaaggggcaaccggggcttttaaaaccgttggtgctttttctacctgtgtttcgcgtaaaaatagggcaggcagtgacatcaatagaatcacgatggctaataccccggcaccaatgtgccaaccatacagtgaaaccaggtatagaaacagaccgctgccaatgatagaacccaaataaccgccgccaacttgcataacattgcaccaagggcgatgttttggtgataaccggtcaatagcgtgaccatcggtggtggtatccaccaccgtcaggcaaatggtgattagaaatagaccgacgataatcagcggcatatgttcggcaggttttgccagtgacattgcacaaaaaagcaaggtaattaacagattaccgcaaatcatgatacgacggggatttgtatcccccgaacccgatttacgatagcgctctataataggtgcccaaaggaatttgaatgcccaaggcagcatcaacaagtagagcaagccgattttatccggggttacgccgtggctacgcaaaaacgctggcatactttgtaacgttaacatgccgatcgtactttggagggtataaacccctgccaaagtcaataatagcaacgatatatggcggggatgggagatattatgcgtcatagtgagatactcacatccagcccaacattcaagcctttattgatcatactgagcgtatttggccccacggtgaaacttgagacacgatactttttatcgcccagattttcgccatagagttttacattcaccccatgtgccatttctaaacttaatgatgcgtcatagagggtgtatcccccctgttcaagagtattcgcttcattaaagtagctttttgaatagtagcgggcaccggcatttaaatagaggttaccgggtaacaatgtttgatcaatcaagtagtcaaaacttgcattaagcatgacatctggcgcataaggcagacgtttattgtcataatttatgccattctctgcatcggttgcatcagtgaagtttgatttgcctacgcttcctccaagagaaaatttcagccctttcattggcttaatctggctactcaactcaatgcctttgctctctgctttacccacattgcgtataaactgtgcaccgatcggaccaacataaatttgtttatctttcgaacgaatgtagtaaacagcgctgtctaatgtcactgcattatcaaagaacgaggtatgccagccgagctcataattatctgaggtttcagtattgtagggtttgctatcattggcggaggagacaatgttattgaatccaccgggtttgtaccctttagtggcagagagatagaaacgggtatctggcgtcaattgccaacccaatgcagtcttaggtgtaaactccttgctggaaacttggttatcaaaagcttcgattgctgccatgccagaacggcccgcatagtctatctgcgatttttcatgggacaaacgaccacccagagtcaaatcccactgagaagcaaagggtaatttcacctcaccaaacagtgccagcgattttccttttattgtgttagccgcatcgccatagtaaccgggataaccactggtatgatgtttattcttttcatctgagaaccagccaccgagaacagtggtaatcccatttgagaaattggagttcaaacgcagctcttgcgtagtggcatgatgtttctctttccatttaccaccaatgaaatcacggtaaatatcgcgatcctgataagaagtcacactggttaacacactgtcgccgaaatcatattcagccttgaatgcataactgttaacccgccgggttaaatcagggatagggccatcatattctttccgacgaaattgttcgtcgtttaaatagagttcttcatgggaatcgagatcttcatgagcaaagctaagttcagcactgaacgaagaatcttctggcgcaaatgtcagttgccctcgaccgagccaggttttgctggaatcaatatttttatcgccacgatttggtgcatcaatttgcccaggctcttttacccaacgcaggctggtactaccataaaggagatcttcaataagcggtattgatccgctgaaagaaccaccttgtttcaacttggagtaattaccggaaagattaagccaagggccttcttgcggcgaacgggtgacgatattaataacacccgcttgtgcatttccgccatataaagtcccttgcgggccacgtaatagttcgacacgttccacgttgattaattcttgtgttaggaattggtgatcctgaggaacaccatcgacataaattcgaacagaaggcgagtagaaatccggtgaactaataccgcgaatggtggttgctgaataggttctattacctcgtgagcggatttgtaaaccagggaaagcgcgctcaagatcttgtacttgagtgataccggcctgtacaagttcctcgcctgttttaaccagaacgctaccatccactttatttaacgcttcttctcgtttattggccgttacaatcaaagcatcttctgtcgcgccagacgaatgttctgcccataccacaggcgaaattaaacaacataagacagacgccctagcgtatttttttctcatataaataactcgttatgcactgtttaaatcatgttttacgaaaattaggtgtggtaaaacaaaaaacataacgggagattatcgatagtcttccatcagggctaacggaatagggacaaaagtagcgcattacgtactattgataatgattctcattaatgataaattgcgttatatttacaatcagaatatatatacacagtaaaaatataatgtctttaatatgtaaaaaatactgttttaagtacggaaacaatttttaactagcatctaatgctaattctacagggggtctcatgaagacaatctatagtgaaaaattagaagttttcactgctgattattgtaattattcacatgaggataaaaatagtaaaagtacacctgtactgattgaggaattatctgacggcattcacataaaccggctacgctttgaactcaacaaagatgtcacagaatattgtgaagggccgccaacggtgtcaattgcgtttattttaaacgggagaggaaaaatggcgattgaaaacggtgatgaattagatattcattcgggaatgatgatatttttctattcacctaaaatgacgcgaggcatgaacttctttggctgcggatcatggcatatactcgacattcgtttttcattgaacgaaattgcagctcaggaattgccaccttttactcaattagcggcaggttttgaaaagaacgccagttacagtgatgtattgatgatggcatctcccatctacccaccatttatgcaaatagtgaaccaaatagaagagtgccaattaagtggcaatgtaagaaaggtttatttaaaggcaaaagcgttagaaatactcgcttgtgtggcgtctcaagtttatgattgccaatataatatggtcaacgggttacaacgccgcgccgtttataatgcaataaaaataattaacagtgattatcattacccttggacaataaaatcattatcaagagcggttggtttaaatgaacggaaattaaaagagggatttcgtgcggttgtttttcgcactttccatcaatatctggaaaacgtccgcatgacgaccgcagaagatttattgaaaaaaggcatgagtgttattgatgtttctaccgcagtaggttacgccagtccaagccatttttctaaacgcttccggcaacattatttgatcaatcctaaagcatggcaggcgaaatatgccgttagtcacactttattaacagaaaatatcatggtcggaaaataaatgaaaatctctgttttaccatgttgactatttagctgactctaaaaaaagatggccattttgacatggccaccccatataattggggtatcgcatgatttatacccgtcatctttcaagttgcctctttgttggctgcgctcactcaccccggtcacatagtttgctatgctcccggggattcactcccttgccgtcgcgatccatcttgaaatccattgggtatatatacccgtaatcattgaagatgcttgattttatccgaaatggagatcattatcctcgctatgaaaatatttattacatcagaacaaaaaatcaaacttgaacgtcttcacgacaccactcgtgatggtcaggtacgagacagaataaaagcgatccttctggcttctgaagggtggagttctgtgatgatagcccaggcattgcgactccatcagaccaccgttgaccgccatatcagtgattaccttaatcaaggtaaacttaaatctgataatggagggtctgatagtttgctttcccgagaacaaactgattttttaatcaatcacttatctcaacatcttttccatcacacccatgaaatcgtggcctatgttgctcagctctggaatattacctttagcattcccggcatgaataaatggctacaccgtcagggtttttcttataaaaaaccttgtggcgtccctcataaattcgacgcagaaaaacagcgacaatttattgaatattatgagaatcttaaagtcacagcgaaagacgaacccatcctttttcttgatgctgttcacccgactcaaggcaccaaactcagttatggctggatgcgaaaaggcgagaaaaaaaccgtcaaaacaacaggaagccggactcgcctgaatatattgggtgccctcaacctgaatgccattggtcgtacggtgttccaggaatatcagaccatcaacgactacaacatttgctgttttttcaatgaaataagaaagtcttatcctgactatcatcaaaaaattcaccttattgtggatggagcgggttacaacaaagctcatcttgtgaaggagtgggcttatgttagcaatattgagttacattaccttcctccctatagtccaaatttaaacccgatagaacgattatggaaggtcatgaatgaacaggttcgaaataaccgttatttcgcggataaacatgaatttcgagacaacgtcttcaaatttttcaccacaacgctaccggatatagcggactcgctgatgtctagaattaacgaccattttcaggtgctaaaaactgcatcttgaagtttcttgggtatatgttatgccaatattatgttatccaccgataagctatccatgctgacgccaaccagagtgactgagttttgcccgaaggtaaacaccagatcattatccaccatagaagcatgatccagataattacttttatcactgctgccttcggtacccaagaacaccagtttatccgtcttgttgtaaccatagatgatgtcttgtccaaaatcaccactgaacaggaaggtattgttattaccctgacttttcagaacatcattaccttcaccaccgacgaagacattattgttgccgaagccgatcaacgtatcatcgccatccagaccgaacagccagctaccggaggttttagaagtcagagtatcattcccatcgttgcctgtgactgaattggcatatttcgtcttcaatccgctgttggaatacaaaccatcggccctgacttgagaatccacctgtttagtcaaaaacagccaggtactttctttacttcttatagtggaaatatccgtagcaatggtgataccgccttgtgcatcacgcatatacaatgtacctgcctggtcataggctatttctgcattttttagtgacttctgtaagtcaaaggtattatggcctttcccgccggcaacaatgttaaatccgccatcatcacggaagatatcattgccgtcgcgcccttccagataatcatttcctttaccacctttaattaggtcgttgccgtcggtaccgataataaaagtactccccgtgtgtttctcagcattccggttcaaatcctgcacccaggtattttcacgggtgacgttggaaagattactgacaacaatagtagagtctttatgagtcagatcgtagaacgttgaatccataatacgttgcatgccgctctgataaaatggcgtcacatgcgaaacccaagttgacggattagcaatagagaagggcaagacattccaccaatctgacgcataatgatcgttaaaattaacaatattatttgtcgccgaatcccttggtacatcgtgaacacccggagagaatgaatcaacgctagtgccgtttaatacgcggaatacgggatcattctcgtatcccacgttcagcactttgttacctttctcatactgtgatggcgaagcgaaagagatataattcgactgggagtagaatcccccccattttgtatcgctagactccgccatactattcacagctaacccacccaaactatggccgctgaccaaaacgtcactgcccgtcaaaccatgagctttggcataattagcgacatggtccagcagccgaccgaaagcgtttggcgcgtagtcattcgaatagtctttcttacctaaagcgaccaacacattattcataatgtcgccgaatgtatcggtaataattgactctcggggaccactcgtaccgcgaaacgcaatgccaatagaaatcaaattaccatcagcatcatattttcccattacctctgcctgagcagtggaatgacttgatttttcgccgaaaaaagtaccgcgggcatccgttttgccctgataacctaactcatcagcactgatagtaaaccatcctgcgtcattgagtttatcttgtgcttgcttttctgcgtccggattccaaggcaatttaggtgtgatgccctgcgatgtcgtgctgccgagaattgcggtcaacaacgttaatggcatccccaaaccaaaaccataattgtaatacccctcggcaaatccgctacccagattatggtaagcatacccggagatagtttttgcgtcggaaaataactctttggaagtagtgtcatcaaagtctttgtactgaaaaacacccatgatgcatatccttattaagttaaaataaagttaaaaaagtgttctaaaagtattaactgactaggtaagtatagattgacggagatcatttaaagagtaattatctaaaaatttataaattagtgagccataatgaaaatttaatatttttacaaaactttaattgaataaatcaagtttatatgctaagcggtctcgcgagtgagaataaacacgctgacatatctattatcatcgttgatagttttctaaagtgactaaattaatgaagagctatagtccataacattataaagagagattggttaattccatttagtgcacataaaataaatataaacatgtaaattaagagaaaaaactcttatcgctgattcacttaattggttagaaaaagaaaattaaaacccgttattctctataaataccttattgattagaatagatgtttaatataatttctttaataagaaattcacaaatacaatatattgactttctatttaacaacgaactttataattaccatcgcattaaattaaagattatttaacattatatcgcagattaaacacaatacttataatgataaaaatcgccataataaaattttattaaaaatagtgcgacattaattttttctctctataatgcgtttttttattatctatattacgagttacgagaaccaaatatgaaacattccccgttgcggcgttcgttgttattagccggtatcaccattccattggtcaactttgcttttccggcatgggctggcagcggccagagcaagaggacgtgaaggcggacgttcttttaaactcacaaaatctcaggttcgcttgccacaagcttccatgaagagtagagattgtagcgtatctgaattatgtgaagagcttgggattagcagacagactctttataagtatgtagggccagatggggaactcagggaacaatattttgatctaggacgaccaaatcgatattctcactctgaaagcgactggcgatttgcgataagtaatccactgaacgcgcgagtctgtctaactttgtcacgattaacgtatctgatgtggcacacaataaaggggcattttctgcccctttattgtgtcagatatatttgacgataaggaaatatggcgtatactttaattatcgaagtataaggggcaaaggaatgataactgtattaagtacagaaacatttgataactggattgatgccctgaaagacatcagggtaaaaacaaagattcaggcacgaattcgcagactgaaaaacggtaattctggcgatatagagccagtaggggaagggttttcagaaatgcggattcatgaaggtaaaggctacagggtttatctaaaaaatcacggaaaagtaatcgttgttttgttgtgtgggggagataaaagtacacagcaaaaagatatagccagagcaaaagccatttacaaagagattgagggggagctatgaaactgaaagaatatgatattgcagaacacttaaacagtgaagaagaaatgcaaatgtatcttaatgaaattatggaagatggtgatccggcattggtactgtctgcgctgggtgatattgccagagccagaaacatgagccagctttcaagagaggtcggtatgtccagagaagggctatatcatgctctttcaggaaaaggtaatccaacattcagcgctatgatgaaaataacaaaagcgttagggctgaaacttcatttcacaggggcttaattgatctgcaccccaaaagttggacgctatacttcaacttttggggctctttagccaacgggtaagttccccggtcttaaacctaaaccctttcacaacgctgaaacgcatgaacatagggtggcccttttcattcattgaaactgccgcaacgaaagggcatttcccttttgcccctcgccctcggggaccgtgctgagccccgccccagtatggctgtggctcagcggtgtgcccggttgcatattccaaatccatgctcagagcgtgatgcacttatcgtctccaccgcgttggttcatggtatgactgtcgtcacacgaaaaatactaaatccttgggtttaaggatgatgaaatatttaaatatgcatgttgggtagtaggtataaaaccggtagtggtgattatttctcattagccgtcatctgtctgattttaatatccggcctctttttgatgccgtacagcaaaaattgttgctgtttcaccctcaatccgatacaaggcgatatagccactacttccaaaatcaataagccattctcggaatgccggatccatatcgtcagcagggcgtcctgcttcaggctgacgtgccagcattttcacgccagcacgtattgttttaatagctcgacgagcagtgtctttgtcttttttagcaagaaaaccatagagccgctgtatatcagcgagagcaggcggagaccaaatcaaacgtggcattcaggtaactccgcatcttctcctgcttcgagcttagctaaccagtcgtccgcttcttcaagcgtcaggtgtagtccattctcttgatacgcttcccaagcacgcaatgcatcctgtttgaaagattcacgcttttcctcgcgctctacatagtcacgtatagcttcacgcattatccaatgagctgaacgatgtcgcacttctgccaaatactggatccggcttttcaagttatcgtcaagttttactgaggttgccattttcttccacctaaatattagaaggtaataccttttaatactatatcatgaaatctccgctttactactaggtaaaaaaacctccgtttttcacttgcgcttggcacgttggctgaatttgaacgtaatctacgccgccaccgcgttggttcatggtatgactgtcgtcacacgaaatgtgattgattttgaattgaccggcgtgccaatactaaatccttgggtttaaggatgatgaaatatttaaatatgcatgcttatattaaataagaaataaacatgcatattgagatatttattgaaaataaaatcaaagcagaacattgaaatattattttacaaatttgaaaaaacatttaccaaatcattgccatctattttttatttccgttattattcaaataaaatcattttcatattttaactttattgtcatataggtttatttttcagtgaaataataattcacatgcattattttttatttcattcttatacaaaaataatcaatcctgtaagttataaaaataatccattattatttttttgaactaaactatgattatctccaatggatagagttatctatacaataattcaatgtattaattacataagaaaataatttaatttaagagggatgtatgagcccaaaaaatgattttaaacctttttccattagaaatgattctaatatagtgagtcaagaaagatatgaagcagataagagtttgcaggaagggtttccaccagacaatatctctacgcatgtattaaataagacattacgccaatcatcaacaatagcctctgtggtagctaattttattgcgacacaatctggcgatgatgttctggatgatggtgatatagataaactcaccacccaactaaatcgagcattaaaacaaatagccactgatggcaaagtgcctaatagccggaaaataaatggtaaggcgttgactgaggatattaatctgaatgcgagtgatgtgggagcatatactagaacagaggtatacactcggtcagaagtatacacccgagcagaggtggatagattgattaagacaaccagtgagattcctgttggtgctcctattccttggccattgccccatccacctatcggctatttcacttgtaatggttccgcttttaataaattacagtacccaaagttagcagaagcttatcctgatggcagattacccgatttaagaggcgaatttattcgtggttgggatgatgggcgcggtgtggatgctaagcgtgtaattttaacatctcaagaggatgccattcaaaaaattacgggaacatttacaactatcagagctgttgttattaacgccgctggagcattttcacttggggatagtacacatagaggcaatacacttgatgggggagactacggaagagtggtcaatttcgattcatcacttgtcgcacgcgcagccacagaaacccgccctcgaaatatcgcctttaattacatcgtaaaagcggaataataacacaagaatatatcttagatactggaatcgccatagccatattagttatgaataatatcatcgtttatcatgacacctggcgctagcaaaatcattttcacggataataaaagctcatcaggtaagatgagcttttattgctttctagacacgctcgaagtttggattgagcatcgtcatcatatttggaaaaccagatgacaagaatacagttcctatgctctgaaaaagtttcagtatgttatcgatgaacaaattcatcatcagaacgaggcgcttctccacctatccggaatagggtatcccggaatgcttttatatcagcagctttggcacggtctgaaaaaaattgctcagtttccagagcagaaattttttccgcaactgcgatagcaataaactggttaacgctggtacgatcacgctttgccactctggtgacttcctctcttagagatttcggtaatcgcaatggataggttgatgtttcactcatttctcactctcctaatggcaatggccggtgtcataacctcaatattaaacgttccaaacacagtaccataataaccacctcatgcaatccctgaaaatcaaagagttcgcttaaagttaatggttaatataaatcaggttgatatttcattagcgacaaacttaattagcttaaaaaaacaaaatcaaatatcaataaagcgctgtttttaatcagcgcttttatctaataaaaacttgcaaagtattttattttctttctacgactcatccaagattaaatcaaactctaattccatctatatttctacttttctgactcgtcagattctgactattaaaaacggcgatataaaaaataagacaagtatgaaaatgcatttttaccacaatgtaccttatcgattttttaccataaatacaattagttacagaataatataaaatccaaaacattatgtttcactctacggctattgcattaagtcaatatccgtgagaatttattccccgccgaaatacggtgggttttgaatatcattaaatgtgtcacagcatattaacttactatcaataacgttaattgatctcttcatctatttctcatcttaattcggctacttactgtctatctcataatacttactgaaatagaccattaatcaggtttggtgcggtttaacgtaagtttgcacttcctgtcatatataaaggtaaaaggtgccatgaatactcaacgtaagcttgataaagtcagaccgccccgagttcagattacttatgatgttgaattaggtggcgcggtcgagaaaaaagaattgcctttggttattggcgttattgggcaatttgctgagcaatctattcccatgcgtgaacgtcgttttatgcaggttgataaagataattttaatgcagtgatggaaggtttatcaccttcattggaattacaggttgaaagtgcgctgccgggtcagagcggatttatgaatgtcgatttgcaatttaaatcaatggctgactttaccccagagaatttggcgaaacagatagaaccgcttcgtcatttattagaggtacgcggcaaactcagtgatttgaaaggccgtgcattgagcaatgaaaaattgcgtgaccgtctggcggaaattctagctgaacatgcggataaattaccgcaagcaaatgaagaagcagaaaccgctgccatagaaaatagagcagatgacgtcaccccggaaaatagcaatatcccggaaaataacaatgcacagtgagggcagtatggaacagagcgttgttgaacaacaagaattgaaaacgacggaaacaagtggtgattttcttgatcaaattattgataacacccaagccattcgtcgagaagccgatcgtgatcgggtaaaaagccagctcgaccagtttctggccgaagtcacctccggttcactggtggtttccggcgatttggtaaacagcattgacgaacgtatcgccgcgattgatgcgctgatgtccgctcaactgagtctggtattacatcacccggaatttcagcgtctggaatcttcttgggtagggcttaaaggattacttgaccaaagcgaaacggataatacccaaatccgcatgttgaacgcgacgaaaaccgatttgattaaagattttaaatcggcatcggatttcgatcagtcaatgctgtttaaaaatgtgtatgaatatgaatacggtacctttggtggtgaaccttattccgcatttgtcggtgattttgactttgataacagcccggaagatctctacttactggagcagatttctcatgtggccgcagccgcccatgcgccgtttatcagttcagtcaacgcgggcatgttggggctgaatgattttggtgaactaccacgtccacgtgatttatccaaactgcttgcaacatccgattatctgcgttggaaacgcttccgggaatctgatgactctcgttatgtcggcttgacgttaccacgagtaattggccgtttgccttatggggcaaaaaccatcccggttgaacaattctgcttcgaagagcaggtaaaagaaggggatagcggtagttatctgtggattaacgccgcctatgcactggcaggccgtatggtggctgcatttgaacagtatggttggtgtgctgcgatccgtggtgtagaaggcggaggattggtcgaagcattgccagcgtatcactatacctctgtgtccggtgaaaatgtgctgcaatgcccgactgaggtggctatctctgatcgccgcgaaaaagagttagcagaattagggttcattcctctggtttattataaaggaactgactatgccgcatttttttcggtacagtcaccaaataagccgagaaaatataattctgacctggcaaatgccaacgcaaaattatcaacccaattgcaatatattatgacaacatctcgtttcgcccattatttgaaaatgattgtgcgtgacaaagtgggcagttttatgtcccgcggagaatgtcaatcttatctgcaaaactggatcaaccaatatattgttggctctgataccgttggtgcggaaataaaagcgagtcacccattacgggaggcaagagttgatgttgttgaagttcctggatcaccgggaacatatcgggctgtagcctatttaaggccgcatttccaattagaaggattaagtatgtctttacggttggttgctgatttaccgccatcatcggctgcctgatttttctatttattaatatttatcctatttattacaactaactggagtagttaattatgagttcttcaatctttttacaaattgatggtattaaaggtgaaagtaccgacagcaaacataaagagtggattgagctggaacatgtcaattttggtctatttaaccatgcacgtattgcagacagcggtaaacgtaaaattaccgttggtgcagcagatttccgtaccattgactgtgtgaaggtgatggattccagttctattggcttactgtctgctgtggcgcaaggtaccgcgattaagaaagtgaaactggaaatctgcacgattttcaaaggcgaaatgcatccttatgcggaagtggaaatggacgaatgtattatctctgacgttcatgaaacctgttcacgtggcggtgaattcccacaagaacagatttctatcgcctattccaaaattaaatggacatttacaccactcaaagaagacggaactaaaggaactaaggtgggaccggaaggttgggatcttatcgagaacaaaaaacaataacaattaccgtttactgtcggcctttggccgacagtttctagccggaaaaatatgatgactcagccttcatttcttcatcgcctgaaagatgattatccacaagatgaaaaacagggtgtcgcacttatctggtcacgtcaggaagttgtccaaagcctgatttctgatttaagtatgttattttcatcaagaccgatttctgaaatttcccctttatttggtgagttgccgaaatcagttttaaattatggcgttcccgatgtcattaatgtggatatttccgatgatgaacgtattgatgcacttagcaataatatttaccaagctatttcctggttcgaaccccgtttgaaaaatgtcgttattacattacaaaaaaatacgccagaaaatatcattttctgggtgagtggaattttcctcgacgaacaagtggtgttttctatctcatggaacagtaccgcatatacctattcaatttcatgggataaataacaaaatgatgttattaccacaaaaaatactgacttattacaaccgggaattgagttatttaagacaatatggcgctgctttctcgcagcgttttcctaaaattgctaaacgtcttgggttcgcagaaggtgtttcagaagatccgcatgtagaacgtctggtggaatcttttgcatttctgacagcaaaaatccaccagcggattgatgaagatatgccggaactgagcaacgccatgttagaggtattagcgccacagtttctacgtcaggtaccgtcggtatcgttggtgcagtttcaacaggacctgttaacatccggtgtgaccggaatgatgacggtagcgcggcatactccgttgatttctcaaccggtaggtgatgtgacatgtcgtttccgcacggtatatccgctggagatgttgccattggatttaacgcatgcagaactaataccagacccttacgatcgggatttcatcttaacgctgaattttaccttgtggccgggtgccagctttcaggcacaacatatccggttgtacttacatggcgcgccaatgctgacccatagcttgtatgaattgttgtcggcccaagttaagcaactggaatgtcggttaggcgagcgtacattcaacctgaatcgccgaggtgttcaggtggtgggctttgatccgcaagataacttatgtgccgatgatccattgataaatccggttcaccacttgtttcgtgattatttcagtttcccagaaaaattcttattcttggatattccactaccggatgctggtttgattacccgttcattaggtgagctgcaataccgttttcggcttaaggattgtgtcgcattgcgccgcattgaacgtatgagtgataaagtcagcaacgaaaccttccggctaaattgcgtgccgataattaatctgtttcctcatcatgcggaacccattattccactggaaacagagcatgaatatctggttcaaccggatgcgcgtcgcccacaaagtatggaagtctataccattgatcaggtcgaaattgtcagccgtcagcaggaacaattaagttccaaaccggtgccgtcattatttggtattgggcatacgcaatctgacgaacagttctcattgttttggcaggcaacgccacgtccctcactcagacataacgatcttgggatgaatatgttcatcggtttttctgatagcagtggcgaacatctgaaacccgaaaccgatgtggtgatcttgagtctgacctgtactaatcgcgatataccgcggcaattaagcaacggtcatcctgatggggatttcgaatcagaaagcgcgttgccaggggtaaaaattctgggattgatccgtccccgattgccggtacgtccacaacccaatagtgcattgaactggcggttggtatcgcaactcaatttgaaccaaatgctactgagtggtccgcaaggagttcaatgtttaaaagagacgctagaactctacaacctgcttggcgatccagccatatcgcggttgattgcacaattacagcagattgcgattgcgccagtaagtgcacgcttgaatcccgccgatccctattctctggcgcgtgggctggaggtgacattaacatttcaggcacaagccggggaatttgttgatttttacctgttttgcagcttgttagaacgttttatcgcaatgtatacaccgattaacagcttcacgcagaccgtaacacagttagagacgattaataatagtacccgccgttggccacgtcgcagtgggaggctgacatggctatagaaaataaaatgcgtttagttggcggccgtttttatcaaaatgtacgtcgtctgcttaaacgttgtcgccagcgtgaagaaacggcaatcatccctgatgatgtggtgcaattcagttcggtactgacattagatgcgccggaaagggaagtcgagtcgctattaccaccgcaagagggggatgaacagtatcgcatggcggtacatcactttggtctattaggcacccttggcgcattaccattgcgttataccgaatggttgattgacaggcgttaccgctatggtgacgaatcagctcaggcgtttattgatatttttactcatcgtctgcttagcctgcgttttcaggcatggcagaaataccggttatatattaataccgagttacaaaaccatgccgagttacaaaaccatgccgagctacaaaaccatgcggaatggcaaaattatcgggctttaccggcagtcattccagcagttgccggccaattgatggcggacaccacacagcgttctcatcccgcctgtgtcgggttgctggcaacaccggtccgctcaatggtgaatttgcagcagctattgcagcgggaattgggtatggcagtcagcatccagccctttaaagggcgctggcaatatgctgaacaggcacactgttgctgtttaggtcgcagtttgttaggcgataacccgatgttgggtcgcgcttattgggatattcaatcaggatttcatattcagttggggccgtttgccgctcggcaacgagccgcctttatgccgggaaatgaacaatatcgcaaactgacacaatgggtgtggcaatttgccggaccgctgctctccttttcactggaattgttggtacagcatagcgggcaaggcaatatattaaatggcagccgccaattggggtgggatggttgtttgggcgataccggcgaaagcaatattcagcgtctctatttggctgaatgtacaggtccctacgcaaattaaaccaaaaacgcaggtaataaaaagatgctattagggcaaaagaatcgttttttacaggttatcggtaacctgtcagatattgtggcactgaacaaaatagaaggtgaagagcacctgtcacgaccttattcattttctgctcagctctattccaacgcagactgggataagctggagtctcatatcggtaaacctttggcatttcgtcttggcgaagcgccgaatcatcgcattgtgcatggcatattgactgaattgcagcaacaaggttttagcgacggccagttttgttatcaagcacgtattgaaccctggctgaaaatgctgacattaacccataatttgcgcgtctatcagcgcatcagcgtgccggatatggtatgtgatatcttccgtaaacgtgggtttaacgacgttgaactggcgctaaaaagccgttatccgaagcttgaatattgtatgcaatacaaagaatcagattttgactttgtgacacgtcaactggaacacgcggggattttctatttctttcgccatgaagaaaggcgtcatgtactggtattggcagatcacccttcggcgtttattaacgcaccgttagcggtattgccatatcaatcgaagatgggtgatcagcaaggctatgggctacgcgcctggcatattcatcgcacaatgattccaggtacggcggaaatgaatggttataacgttaaaagtgctgcggcaatcagtgccagcgccaaagcgaacagcggctattctaccaatcccaagctttctatctatgacgaccgacgtcaggaggaacgtaaccaactggaaacacaggcaacgctgtgcatggaacaatgggaatcacagtcctattacgcacgcgccgttaacagttatcccagtttacaagtggggcatcagtttaccctgaaagggcacaccagcgccgatggccgttatgccgtcggccaccagcgattaaaagcggagaacaacctggaggaaggtgaattactgttttcgtctcaggtgaccttattcccggcgaataacgtattccgtccgcgtccttcggttacgcggccctacatttccggcgtattgtccgcgttggtggtagggccgacgtcagaagagatccatacggatgaacagggtcgcatcaaaatccagtttcactgggataaagagcataaaaaagatgatgacagctcctgctggatacgggtcagtcagttctggaatggcgcaaagtttggtgcacaatttgtgccacgtgtgggcaatgaagtcttggtgagttttattgatggcgacccggatagcccgctggtgaccggaacggtttataacggggtgaagatgccaccattcgcgctaccggggcagaagacccaaagcgggattacgacacgcagtagtgcaaaaggcacggtggagcaaggacatcagttctgtttcgaagataaaaaaggtgaagagtttattttgcttcactcacaaaaagatatgcgcctgaaagtgaaaaatgatttttcggcgcagatcgatcgcaacgtgttatgggaaatccaagaaaagcgcgatacccaaattaaaaagggcaatgacacattaattttgagcgagggcaacgccttaactgaggtgaaaaaaggtgacaaaaaacaaacgctggatcgtggcaattttaccaccaccgtcagtgcaggcagttatgagctggaagtatccagcggtaacgccaaaatcaatgtcggtcaacaatgcacaatgacggcaaatcagggcattgaactgaaagtcggtgccagcacattatcgattaccccggccgggatcaccatcaaagcgccatcggttaccgtagaaggatcaggaaaactggcgttgaagagcagtggcatggcggagctaactggcaccacggtaaaagtagaaggcagtgcaatggcacagctaaaaggcggcattgttcaggtggatgcgaccggcattgctatggtgaaaggcactttgaccaagattggttaatagcaggatcaacgaataataagagtttgccatcatggttaaattacgacactgccagctttcgccacaggcggaattggtactacaacaacacgcggcacatgaacagaatctatcggcgctcaataaagaaatattgtggcaagacgcagtgtactacaccatttttatgttgccttacactcaggctctggaactggcactgacatttatctcctgtgtttacgaacgcgatctgatgcaaggacaacggtcgttattgcaacaagtgcggcactggcgggttgatggcggtgatccgttgcgtcatgaactgttcgaacaggcgcaaacagtcgggtttgataacccgatctcatgtctggcgctttccgttttttggagtgaaggcagcatgacctccccggatttggaagcggtctatccacaaccgtggcagtcactggcggcattagccgatacgttgtgcctgatatttcacctttatggcgaacaaccagaacgacaaatgcagtacgttgagcaattttttcaactggcacatggtcaactaaggcaattgccgccatcgcaggatcagggacgcaaaaactatctacaccatgaagccacattatcaggagaacaatgatgccaatgccagccgcccgtgtgggtgatatgcatatttgtccaatggtctcgcctgcggtacctccggtgccacatgtaggtggaccgattatgccaccaggtgtaccaacggtgctgattggtggattgcccgcggcaacaatgggctcaatgctagtgtgcgtcgggccgccggataccgtagtcatgggtagcccaacagtattgatcggtggacggccagcggccagactcggcgatctgtgcgcacatggcggcacaattaccacaggctatccattggtgattattgcttgaaatggaagttactgtgaacttagcccaaacagatatcgcgcgttttttacaaccgattgctgctgacaaaccagcagggtgcgatatcgaatacgaacctatttttgaacagataaacgccgcgcgtgaaaccgacgacgattttctccaagacgacacatggggttatgaaacccgtcaggctgattggatgaaggtttcagcgttgtgtcaggaagtactggaaaaacagagtaaagatttgcagatagcctgctggttaacccaagcgcaaggggaactgtatggtctggcagggattagtggcggtatcacattacttgcccatctactggaaactttttggccggtgctctacccgccgctggatgatacagaggcaaacagtgcggatgcccgtcttggtcggttaagctggttggataatcaattggtgaaacaattggacaatctgacactgaccgatgatggcaaattgagcttaagcgtctggcaacgcgtgcaatattttgaacaacgcgctgccgttaatagcgaattacgcagtgccttgatcagtgatggttatttcggtatggctgagtgcgacggcagtattcgcactacacccgccgaacaatttaaccaattactgacgcgggctgaacaagttaataaggcattagcagaactgcaaaaaatcatggtggaactattgcctgatgccggtaacagcatgagtgccagtacgcagcgattgcaagagctggtggccttaatcgaacgatttcgtgacatggtggcaccgggatcaagccaggaatacggcaatagcaatgaagcaatagcggcagggggagatgcgccaaacggcatgaatacgacttttttaacagaagatcgggcgcaccatgaaatgcgcgctatcgccataggacaaatgatcaatatcgccaattactttcgtcaaaatgaacctaccagtccggtgccctatttaattgaacgtgcagcacgttgggcaaatatgggcatggccgaatggctggaagaaatgatgtcagaaaatacctccgcgctacaagaaattatgcgcgtgatgaaaggaccagaaataaatagagagcaaaatgaataacataaatttttatagcatcattaaacgccgttttttaatattgacagtaattcttttaataagtggttgcagtcattctatctccaacgatgaaaaacgtttgcaggcaatcgaacaagccaaaccggtttatgccagcaatgccattcgtttaaaaataaccgcggttccgcaactgaatgtttttaataatataccaaacagttgcacaatattaattgttcaagcggagaaacgtgaacaattagataaattactggctaatccggcgttattacgcaatttattttccggcaccggtgcaacagaacacatattacagttggataattacgtgatgatgccggggcaatcagtatctttacacatcgatagagcggaacaggcgcgttatatcgcattaattgccggttactacccggcaccagagagtactcatacgcgagtattatcactgccgctgcgccttgagcaacacggttggtggaatagcgcctggagtgctgaatttgttcccatgcgtattaatctgacgctaggacgttacgccattacccgcagtgatttctcagcaggtaacactggcgatgaggtagttttccccgaacaaatcgttttccccggacaaacggcggaatccggcagtgacgaaagtgtgttgaggaagtaacccatgtttgaacataaaccgatgtattggtattcaggattatatttacagccgcaacactttcaggcccatgaattgcaacatgaatactggcaaggacgttatcagttactgacacaaccttatgcttttggtgtggtgaaactcgcattcaatctggccgcgctaagtgatgaagtactgagtgtccatcacgccgcgtttatttttcccgatggtggttacgtggattgtgatgtcaacggcgtactcagtgcccgatcattgcgggattgctggccggtacgtgacaaaccgcagcgcatctatgttggcctgcgcatgttcagccacaatcagaataacgtcaccggtatcacggatgccaatggtgtcggtaatatcaccagccggtgggtaacatggccgcaagaacagcgtatgcgggatgcttttggcgaggggccggaagcggaagtgcaacaattgacctataacttacgttttttcttgcacgatgagattgctcaggcaacgggttatacactattaccggttggccaactgcactgcaccagtgacggtattgcgctggataaccgctatctaccgccatgtttgacgctctatgctgtgccacaactgggccagcgcattgatcaactgtgtcaggagttaaccgggcgtatccatcaattggaagagttgaaacgcccgcaaacactggaaggggaaatttatactcaggaaaaaagcacattattgctgacactacggactctggcgcgttatgtcgtacagttgcaccattttcaggaagcgagagatgttcaccccttacagatttttggattattgcgccaactgatcagcgagctttcctgttttaccgaccgttgctcctttttaggccagtggaacgggcaggaagaggtactggagaaatatcagcatctggatctggcgctaactcttgatagttgtgaacggacaattgccgatttgcttaatgcgctggtgctggaacccaataccgtgatctctctgcaacaggaaagccgtggttattatcatgcaaccttcaatacaacggggagcaatgaacagcaacggctctatttggtgctgcgttctgacagctttactcatcgcgagcgtgaaattcctgatgatcgcttgattaaactggcggcggcagaacagatcgacaacattattaaccgtgctttgcccggtgtacgtctgtactaccaggaaattgcgccacatggtttacctaaccgagcaaacacctgctatttccggctagaaaatcgcggtgcattatggcagcaggtagaagagagcaaacgtgtggcagtgcactgggcagatgcgccagacgatttacaaacagaaatcgttatagtgagagcgtcatgatgcagttgttggattgttatattcccgtattcacttgcgtattgcgcatgatccagcagcaggtgaatcaagcggaaacactgcggcaaaccgtattagctgagttgacacaagcgcagaatagggcgcgtttgcagggttatggggcacaagatatcgaagaggcaaatttcgccgtagtagtttgggcagacgaagccattttgtgtgcaggtcagaaagcgttgagtatttggcgccaatcatcattgcaggctgagctttatgatgccgaactgggcggaaatacgttttttgatcgccttgcggcattagtaccggataattatccggttcgattggtctatgttttctgtctgcttgctggattttatggccgttatggcaaacatgataatttggaattacacaatattatccagcaagagttaaataatcttcctgatactttgcgtggttatctctctttagaaaatcaccgattaatgaacagctacgataataagccgaaaaataaataccccaatcataaatggcgtagaaaattaatattattcatgtcatctattacattaatttatatttttattaccgtctatttattaagtattggtcggtaaactcggaaatcaaacatgaaaaaattattttatgccattggctggcttagcgtgatggttatccttttattactcagtttaactattgcggtggcattttcatggccgacaataggtggtttattactatttatttgcctattactgttgttattattgctgcgtgtggcaatggcattcatgccagaaataatgaataaactgcgctggttaaataaattctggcggaaaggaaataaccgtctggaatatttactctatcagcactggagacaaggaggatatttacaaagttggcgtcgattccgttcactgttacaccgtaacgaacccgttccaccgtggtttctggtggtaggggaacggggcaatggtaaacagaagttgttaacacgctgcaatgtggtgcccatgacggggaaaaatctgccagcgctgacagaaaacacctttacctgtcgctggtggttcttccgccgggcaatgtacatggttgtttccggccgttataccgaaggtcaatccctgtaccggcaagcctggttgcgtctaatcagttggatcgcacaagtacgtaaacccgctggcgtactcgtttgcttatcggtggaacagttgctaaacagcgacaatagagcgctctatatcgccgcacgtcaggtacgtgctcagttggaaccattacagatacgtctggaacgccgcttacccatctggctgatccttacccacagcgaaacattgccggggtttgaccattggtgcacccaactgtcagtagaacaacatgctgaattgctaggcgattttatcgagcatcatacggtgggtaatgtcaccgacgtgctggataagagcatgaacaccattgttaacacgttgaaaatgatgcgccttaagttgctcaatcagcaacggcagcaacccaatgcagaaatcttagcgttaccagaaacggtagctcaactgcaacctgcactgggttgttacttgaatgcactgttcgaccaagaccattatctggagcatggtctgttgcgtggcctgttttttaccgccgagcatcaaactgctggcgttttcagccaacgtttgttgggagaatacctgccagatcaagttcaacatagccaagatcaacgtagccataacgtattgctgactggctggcggacattgaccaaacgcgtatgcgttagcctactcagtttgatgctggtgtacggtgtcggcaatgcattgatgacgacctggcgtggcgttacgcaacttgaaaatatccatgaggcagacccgcttgagcggagttacttgcgctaccaaaaagttgaatactggttgcaggaaaccttgccatctctgtttttctatccggtcacccatacgatggaacaacggatggcacagcaataccagcaacaagcacctgttggtgcattcaacccggagtcggtagcggcacacttactagcacgtttccataacgcggaaacaccgcaaaaacgactgttggttttacattgggcacgctttattaacatagaacaggcaatgacacatggcgctacgctagaaactttacagcgtatgcctgcttattcagcttcactattaagtggtgaaaacgatcctttatccgcggaacaacgcgtcgcacttcgtctggcgcaatatcgccaaggcaatgcacagcaagcatttgatcagtggcgaaatgtattgcaaacactactagaagatagcaataactggcagtggctattagccgacgaacaaccgactggcacgcattcgctgacactggctgatttctggccgctcgccagcgatgatgttgccacaattaacacacgtattcgtggtatctatacccaagcaggtgagcaagatattcaggcaaccttaggagaactggcacaagcccttaacagaccggcattctttactcctttacagcgctcgttttatcaacagtatcaaaatcagcgccaatcagagtggttagcattcgctcaggctatgcctcaaggagagatgttagttcgaggcaagaaaaactggcaagcgctgatattagcagcgggccaatatgacagcccctatatcacctttctgacccagctagaacgtgatttatcctcgatagagcaggcggatcggcagccttggttacagacacagcagcgtttatggcaactgcatggttatgtgcaaaaaagtggcatgatgcaacgagtctcgctagggaatttctctgtgcgccagcgcatcatgtcatggcttggaatttcaccgcagatctcggtacggctggatgataccgcgctgacacgctatcgcgcctaccgacaggcggtgcagttaaatagccaacgcgagttgctcagtgatatggaaaccgaggtgttggttaaaaatgcgctaaataacgagaaaggagagttggatgatagcggtttacgcgcattgtttaaccgtttcaccctgtggcaccatgagactgaaagcaaacagagtgcaggagtaaatgaaaccttatggcggctctatcagggtgatgcgcatctggtactgcgttacgccttcttaagtgctgccagccgcttgcaaactcagtgggaaagcaaagtgatttggccgatggaaaaattgagcagacaggaactgtttgatggccgggaattgaacgcgcgtttgtatgaatacagcaatgcatttgtacgggataccgcagggtatgcgctggatatccgtcctgaagggattaaacgtcaggaaatagaggatgtagtctttccgtttagcgacgatttcattttctatatcaataacctcattcaaccgaatgacctactttcagcgacatcggatattcgccgtcgtctgcaagagaaactcgccttattggaaagcgaacagcaactgacgacagcacagcaggaaccggagcaagaacagaagccatcggcggaagtaaccattgtcagtcagccggcgaccgctaaccggggggcaaaagtattgccagtaggcagttcagtgacgttgagttgtgatgatggcgtacagcagcttaagagtatgaatttcaatgacagcatgacgctgcactggagcccaggaacatgcggtaaagtacaaattgatatctattttcctcgctttaccctaagcaaaagttacattggctccgatggtttgctgcaatttatgcacgctttctcccgcggtgaactgacattagcagctcaagcgttcccgcaacggcgggatgaattaagtgcgctgggtatcaataacatcactgtgcgctatcaagtcagcgaaagcacagcggtttcaacactctaccaacaatggcagcaacatcagcaacaacaaacggcgttattggaacaacgcaaccgactggatagccagttgttaaatttaagtgaacctacagtggcaaagggaactctctctactttgccatcacagatcaccacccattggaacgaattaaggaaacctaaaagtgagtaattatcttaaacagatcgtcagtaaattaacggtagaagcgcgtcagtgccttgacgaggcggttaatctggcagtacggcgcacccatcatgaagtggaaattgaacatttgctgttggctttgtttgaaaaacagcttccgacgatggagcaagtgtgtcaccacggcggtattgatagcatgacattgttgaatgcttgccaacggtcactggcattattacgcagcggtaatcatcgtccgccggtgctggctaccaacttaactgaatggatggaacagacctggatgtacgccagtactcactggggagcatcacagattaccgctcaagtactgattgtggccctgatcatgaatccgtcactgcaccattctcttacctcagagctacaacaagcgttacagggtaacaccgatgggatagaaccgtggttgcgtacacagacaaatacgacaccacaacacattacagcacctgttggggataatacccaatccgcactggcacaatacacgcatcacctgacacaagcagcgcgtgataacaaactcgatccggttttaggacgtgaacgagagattcgtcagttgattgacgtgctattacgtcgtcgccaaaacaacccgctgttaaccggtgaagccggtgtcggcaaaaccgcgctgattgaagggcttgctcagcggatcgtggatggccgtgtaccgaaagttttggcacaagccgaactatttacgctggatatggggctgttacaagcgggtgccagcgtaaaaggtgagtttgaaagccgcttgcaaaaattattggatgaggtgaagaagtatcccaccccggtgattctgtttatcgatgaagcgcatacgctgattggcgcaggtggtcaagccggacaaaatgatgcggctaatctgttgaaacccgcgctggcacgtggcgaattacgggcaattgcggcaaccacctggtctgaatataagaagtattttgaaaaagacgccgcgttagcacgtcgtttccagttgatcaaagtcgaagaaccttcgctagaactggcaatcgccatgttgcgggccataacacccgcaatggaaaagcatcataacgtcaaagtacttgcagaggcagtcacggaagcggttacgttagccaaccgttatatcactggacgtcagttaccggataaatcagttagcctgttagatagcgcctgtgcccgcgttgccgtttcacagaccgatgaaccggcaccgattgaagatctgcgagccatgttggcaaacattgctgccgaacaggaagccctgttacgtgaaggcggccatgaaactcagttacagaaattggcgcagcgtcaggctaaattgcaggcatcactggcagaaattttgccggaatatcacgctcaacgtcagttggtcaatgacatcctcgcctgtgacgaacacgacgaacggctaccagtgttacgtgcagaactgcatcagcgccaccatcagcacgcttatgtctttgactgtgttgatgccgcctgtgtagcagacattgttgctggttggacagggataccccttggtcgaatggtcgaaaatgagcgtgatgtgttgcgtcagttggaaacccgtctcggccaacgggttatggggcaagatcatgcgctcagccagatagcacgtcaaattcggattgctaaagtacaacttgccgatccaatcaaacctaccggagtatttatgctcgcagggccttccggtgtaggaaaaaccgagaccgccttagcgctggctcatgagttgtatggtggtgaacatcatctgatcacaattaacatgtcggaatatcaggaagctcattcggtttccggcctgaaaggttctcctccaggctacgtcggttatggacaaggtggtgtattgaccgaagcagttcgacgtcaaccttacagcgtcgtgctacttgatgaagtggagaaagctcaccccgatgtgctggaactgttctttcaggtgttcgataaaggcatgatggaagatgccgaagggcaacagattaactttcgcaatacgctaattatcctgaccacaaatgcggcatcagatttggtaatgcgggccgccatgcacggcgtaaaagagcagggggaaaatcgcccggccaccctggaagatattcaggagattatccgaccagagctacaacgtatttttacgcccgcatttttaggtcgtttgcaggttattccttatcttccggtacagggcgaagttctgcatgccattgtgcaccataaactgaataaaattgtcacacgttatcgtcaatcaacccaatgtgaattgcactatagcgacacgctggtggattttatcgctaaaggatgccagatcgcggaaagcggtgctcgtgaaattgataatctgttaacccagtttgtcctgccgttgttatcagatcaattgctattaggtggcgtgccagtcaatcaggatgtctggatggatgttatagacggtcaaatacagctacgatcagaccaaaagaaactatcactatctaatattatcaactaagggtagcaaacacttatctctgctattattatcttacaatgtaacatcagtgttacgaaatgagatcccgatgaaaatgaaaaagatagtgatcttctggtttatctttacattggtcaatttcgcgctggcactgttaaacctacaggtacgggatgtgtggagtctgtcatcactagtgtggtttccggcaggcttgttacaaggcattttttgcgccagagcaccgcggtactggcctgtctggttaatcacaggtgccttgatttcgctgactgccagtcagtggtatggaaggccagtcaacgtatcgctgaccttttccagcatcaatatgatgatgctggtagcaacagcgctgatctggcagtttttttacggtgtcatgtgggcaccgaagcggacgagggacatcattaacctgaccgtactctgttcgttaagtggcatcattgagcgatttatcgcaaaatggatactttatctatttggttatcctaccgacatatcggtttcattgccgattgttgtaggctcagtgttgagttatctaccacttacgttgtttgttatctactacatcacccacgagaaaaatgaggttgggaactggaaaacctacggtttatgtctggtggccctatttgccatgacagcattgttcatcagtccaccaccggaagccgggaaaatacactggcaaggtatcgcactgctgttttctttcagtttgccgatgctgctagcattcagcggtaatctgctggcattaagcagctttttatccctgtgtacggtggggatcgtcagtgccaccatttttggtcttggcccattctcatcgccgttaacccatctccaacaaaatgtgcagatagcggcttggtacagtacagcgttaacgttacctgcgttgttatgctgtagctgtttatccaacataatcaatgcattacatcggcgtaaagcgcgttttctgttaatgagagcgatgctggatcaagaacaggttaattgctttcggttaagcgccaaaggacatttgtactggcatcataatagtgctgcctggatgcggttcgggaaagcacctgcctcctggtcgcaattgatggcttgggtacatcaggaagatcggcacaaaatcgaacagcttaaaaattctgtctcgcaaatcccgcagacactaaaagttcggattgccgatggcaaaggcgaatttaacctgatcattatcgctttaattgtccatgtgggagaaaatgccggttttattgaaggaacgatacgtgaaataaagagtaaataaaaaatagtcaataatctggagaaataacccatgcccagacaagtcattattgccgacgatcatccggtatttttattaggactacgtacgatactggcaacattgccggagaattaccagattgtgggggaagcccatgatgtcacttcacttttctctctgctggaggaaaaagaagcggatatgctgattacggatttcattatgccgggtaataaccagatcgacggtctgaggatgattagccgaatacgggaacagtatccgaatttgccgattgtggtgattacgatgattaacgaccgaaaaataatagcttcattgattgactacaaagtaaaagcgattttgaacaaaaacagcttatcccatgagctggtaaaagggttgtacagtacaaccggacgttatgaaccctatttaagtgaacaatttctcgaatcaccggacgaagaagttgtaaaaacgctaaccagtaaagagttggaagtgattaaactgttgggacaagggttgagtgtgaatgatattgctgcgcgtttataccggactaagcagacgatcagcgcccaaaaaatcagcgcaatgaaaaaactcgggttagatagcgaagccgcgctttataattatttgcatcagattgggctggggctgtaagccatgaagtgccggtgcaaagcatggcgatggtttaccccgttggtattactgttaccgctatctggctggagtctcaacctcttcgaataccgcaatgcgcaagaattgccggcaaatggattaccggtggagttttattcaaatatcacgcaagaatcgcaggaatttttgccgttgcccattaaagagcaagcggttcttccctcacgcttcccgacattaaaagtcggcattctctgctgtatcggtgcgccactggtgatccatcgttgggacggcaagttggaaggaatttatgctgattatctgcgcttgattgaaactgtgctgaaaaggccggtggaagtacggctatttggcaactgggaatcagcttataaagcgttgcaacgtggcgatatccagttgttatcgaattccgcctcctcacaatcaggaaatgaagccaatgacacttacccgattctggtacaaccacttgccctgatgatgcgcaaagaacaagtcaatatgccatttgccaacatgaatattatggcggcacccagcagtgatccgaatgtcattaagcaattacgtaaacattaccgcactattttaatagccaaaaatcagcaagaggggatacaggccgtcgtggatggcgaaatggatgcctatctggacggacaaagccagattgcctatttactggcttttcgtccgtttaccggattgacttaccgccgggatatttcattcggggaacgatatgattttcttggtcacagcggtgatggcatagttgaagcggtaaatctgatcctgacatccattcctcatgccattagaaataaagtttatgaacgttggatttctggactggcgttgggtaacaacaacgacgccgctattttttcagctcaggaaaaagcttggattaaaaaaaatcctgtcatcaatgtggcactgaatcgcaatacaccgccttattcctttctggataaaaacggtcaaatcaccgggctggatgtggacattttacgcttgctgggagaaaaaagtggcatcatctttaattttatcccaacagatggtgcagtaggcattaaaaagcggttagaagatggcgaagcgcaaatgacctcgatgctcaacacgcccgaacgtaaccgttggctctctttcagtcatccctacggtaccgtggaatgggtgatgatcacgcgcaatgagcgtaatgcgccttatgagtttgaacaacttaaacaccatcgggtggcaattcagcgcggcaacgcacttttatcactcttaaaacagtatccagagatttttatcatcgaagttgacagcgtgacacaaggtattgatatggtactggccggagcggcagatgccacttttgacagcctgatcagtgctgattacctacaagcaagccgctacggtgccaatatttctattcaattctttaaaggctcattgcaaccggaacaatacgccgtcataccggcctatcctcaactggtagacatattaaataaaagcattgatgcactgccaccaaatgaactgcgggtattacggttgaagtggttatccatggcgaatgtcacgccttatgatgacaataaaatctctccttgggtgaagctgtggggaggggcattatttgtaattgcattaagctcggctttttggggcagttatcttgcacaccagatcaaacgacgtaaaatcgcggaaagcaacttacagaatttactggcgtactgggaaacactctttaataacatgcctacgccaatgtttgtctgcgatcccaccatgtgcatcacggcggctaacctctatttccggcatgaaatgggctctgttggatctgaggtgattggccgcagtcttttttccctatgctttttaaaaccggtcgatgagcaagagatcagtctaatttttctacgctgtttggaaggtgctcctgtacatttttctgatcgcaacattgttattcaaggacaggataaagatgtctatttgtggctcgaaagttatagcaataccgaaggcgttgttcaggggatcattggcggctggtttgatgtgaccgaacgtaaattgttggctcaggaactacgccaggaacgtgataaggcggaactcgccagcctggagaaatcagattttctggcccacatgagccatgagatccgtacaccgctccaagccattatcggtattcttgatctggaggtaaaaaagcaaactcagccatccacgccattacatatcgcctggcaggctgccatatccttgcaaggaatcatcggtgatgtactggatttctccaagatagaatcagggcgaatggtgctaaatctcaagccggaatcattgcaggtgattctggaaaattgcgtggcaacttttagccatcgggcaaaggaaaaagagttatttttcacctatcagtttgatttgccgtctgaatattatcatctactggacgcaacacgcgtaacccagatcatcaataacctgttgggcaatgcgattaaatttaccgaacagggtggtgtacagatcagcgccagctatcagcttattccagagagtcagcaagatgaaatcacgctggtggttgctgatactggttgcggcattccagaaaccatgtatgaagcggttttactgccctatgtacaggtgacacaacataatggcggtaaaaccggtacggggttgggattacctatttctgtacagctagttgaattaatgggcggcaatctgaaaatcacgggtgcgcccagtggtggtgcgcaggttaccgtgatgttaccgctgacgcgcacgattattgaaaaagaggcgataagcgaaaaaaccgaaaacattgagacggagcttcatgaatctttgaatatcttagtggttgatgatttacctgccaatttacaggtgttgtcattacagttagccccatcgggccatcgtatcgcgctaactgaaagcggtgaacaagccatgaagctggtggaggagggctatttcgatatcgtgctgacagattgccagatgccgatgatgaatggttaccaactggctcagttactgagaacacatgaacgattacggcaattaccgccatttattatcctgggctgtaccgcgaacgcgttctctaccgaacaggctcgttgtttggaagcgggaatgaatggtgtattaatcaaaccactggtgcaaagcaaattgctggcagaaattacccgttattaccgacaaatcaatgaggaagcaacattaacattcgatgagattcaagcattggctcagcaaaatgtggctgtagagtgccagttacttagcgcaatacagcaagggatgtcggaagatattgccgaattacaacaacaagaaaatcaacaatgccatgaaaaagtcgtgcatcacgcccatcgtatgaaaggcgcttttgcgctgatgcaatatcagcaaggaatacgtgtctgcttgcggattgaaaaaagtgagcagtgtgatgtgaaaataatagccgttttattaactcgtgcggaatatttccaacagcaaattaagcagaaattgggggaattgcatagttagaaatcaaatgaaacgacacagaaaaaccttagcttgaaaatataaatgcaatttttgtcatcgtaaaaattggaaaaaacaccattttgacgtacattgctctcacattatctaacgggtatacatctaaggaaggtattctctatgaatacagccacagttagcaactttatcctgactagtgcattaacacatgctgaaaaaaccattcatgaatacgaagttatgagtttgaataaccgagactcagaagttttcttcaatgcattggttaaatcggttcgcttcaataaaaagctggcagatgccttcgaagaacataatcaacgtgtgatcaataaataaccgataattatttaaatctattattaggacaataatcattgaggattttttatgcgtggcggattcgactaataagtgcaatttttcagaagggcggtcagttgctatagtaggcatctttctcgccaaaggaaaatgcactatggcctatacacaactgaccgaaacagaaagataccagatttccagtttaagagaagcgggtttttcacagctttttattgcgaagtcacttaagcgaagcccatcgaccatcagcagagaattgaagagaaatcaagaagtccagacatactgccctgaacaggctcatttgaaggtattggcgcgtcgtcattttgctaaaaaggccgtgaaaataacgccggaagtaaaaagatggataaaacggttaatttggaaagatttaagccctgaacaggtggctgattatttgaagcaacataaagggatatctttgcatcatgagacgatttatagactgatttatcaagataaaagagaggggggtgatttatggcaacatctgcgaatagccagaaaaccctatcgcaaacgctatggtcgctatgaaagaagaggtaaaattaaaaatcgggtcagtattgatgaacgcccggaaattgttgataaaaaagaacgtattggggactgggaaggagatacgataatagggaaagataaaaaaagtgtcttattaacattggttgaccgcaagacgctgtatacaattatcgttaaacttgatagcaagcaggcatcagaagtcgcgaaagcagcagtgaaagtattatacccgttaaaacaaaaggttaagaccatcacgttcgataacggtttggagttcgcagatcatgaaatcatcggtgaagaattagaaacccaaatttactttgctcacccttattcgccttgggaaagagggatcaatgagaatatcaatgggttaatcagacaatactttccaaagggaaccaattttaatgaaatctctgatcaggaaataaattttgtggtaaaccgattaaataatcgtcctcgaaaaacacggggtgggaaaacaccgaatgaattatttaaaggaatacgaacatgtttacttccagattaacgatgttgcacttattatgtgaatccaagcgtgctttatattttttccctattttcttatttttatcttcttgttcaataaatctcccaccttatgaacgggaagcccgacattatgtttatcgctctaatgatgattttgaccctaattttgaaacacatgtaaataattctattaagcttatgacgccattctttgaacaattttatcgagaaggagttaaggatagaatgaataacatcagttcacatgaatttgagaaaaaaattaattattttaagagtgataatttaattcaagaaatcggcatgtccgaaatattcatttcacccaaaatacacacaaaagaaatcaacaatagtcagatttcaaataagaagaaaaaagcattaattaacggaatcatcaattcttacgaggccggttactatggcaagtaagaaaattaactatgaacttataagcataatggaagcgggggagagggaattaacgatggacacaataaactattcagcatttagaactcacttcgccagccccttagataaagtgaacgacaatcacaagccaattctgattactcatcagaatggcaagccagcgatcgccctacgtttggaagattttcaagcctacgaagaaacagcctatttaatggctagcccgaaaaacgcggcacatttaaatcaggcaattgctgaagtggaagcagggagaatgattgaaaaagggctattgaaagaatgattttatcttggactgaaatggtaaaggcaaccctttgatggagaacctttaaaacataattgtcgggttattggtctagacgtattaatcgagagcatcgtctggtttacaaggtaacagatgatgcaatcattatcgtgcagcactattaaggactacctatcagaggacttcataaacgaagtcccctagtcgttattttaagaaatcgtgatggcgactatgcaacaagccaaataccatccattgttgcgttactttttcgactagtcaaaatccatcaatgagaaaatccaaagcatctttaatttgtttccggtgggatgtgacatcaataacttcattaccgatcatagatactctgatacttgccatttcatgagtcatgacgatgtagtcactctcctcaattgtcaatattggacataatcttataggaactttgcctttaaaattttctttcagaaacaggggtatcattaatcttgtattcaacatatcaataatgtcactctgtacgtcaagaagatatgggtaagcagaattgccaatattgcgataaacaacatactgcatctcagaacaccctgtacttgtcagacagtaaaccgtgttcgttagtgatacgattaagttcttccattcctgccttattctcacgtttccagcgttcagactcaacggctttcagttccgaaattagtgctttagtcagcactgctgataagttaagccctacctgtctcgcttgttgatacagttcaggtgcaacggtcacgctcactgttttctttaatctgatttgtgttgctggcatgttaacccctgtatgaaacacgttattttacacttgtaattatagcaagcttttttatataaggacggcagaaaagagtcaatacatctaatccaaaggacatacccgaataatatgaccatcgggatcttcaacgaggaaagtacgaccaaaaatttcagtgtggggttccttcacaatcttgatatcgggtttcttctgccattcttcaaataagcgatctacatcttctccagatggcaacataataccgatctcagagaaccgaggagtagaggcatctggcgttgttccgcctgaccaaatagcgaatagtgcttcaccgccagcggcaaatgccacataacgagggctcgaaaataccggcttagcattgaaaatcgtctcgtagaagaccgtcgaacattcaatatcagatacgtaaacaagttgaaggttaggcttgggggatactgtcatcatgtaattctcatctaagttagattcaataagagagtaaaagcaaatcaatatgtaacatttgttaccggattgcgcttgtatcatagtaatataatgttagcaggctgtatatacatacatatgtaaattgatgtgggaattctgggatatggagatgtctaagatcgaatcttgtggggaaaacatgagagttacctcttgcgctttgtataaggattcaacatccatatccaaaccggtaactctcaaccttccaaagtgctttgtcagatctgataagactagcgacagttaatcgtcaagggaatttttcatcctattttgagtatattcaatcaattcttcaatttctaagctaggggttgtaccacaatgaatatcacagaacaatatcgggttagatcctttcgacgaataaaaaccttggatatcttttaaatttgattccctagctgcacataaagctcgtaaaattctttttaacctttctttatcactttcgttattaataaagttttcaagattcgctctaccaccgtgggaaatctgaaagaaatgattaccactattattactggtatcaatgcgtttcatcttaataatagtagcgtcatcattacgatctataccattgctaccttgaaatgaaaatttagcattaaaaacgtctaagtatacgcttggcaagccataactacgatcacagtttttaaaaacacttttaatagaattgtttagattcattggcttatacgctatattatcaagcatatatacatatccgcctttcgcttcgcgagaatttcttgtttctgcttcggtaagattaataatttcaccatttcctaattgtatgtgagccatctcataatccccttttacttgtcaaaaaaatgtgtattttcacataaaagataagaaaaattcgtattcatatcacgattaaatattcattttatgacaaatcagaaaatatactgacttacaggattttattcactgatagtgtagtattttgagaatattgtttcaagaacgactttcgagaatactaaccccttgatgttgtgttgtgctaatttgactgttcccaacgtaggacctgttagccaataactaatttactgcctatctcaatagggctattttatttgcccttctttgccataaagagcgaacctgggcagtgctcaaaatcctcacgtactacgtgtacgctccggtttttccgcgctgtccgtgttcaaactgcctgcaacaattacgcctattgagataggctcttaatcataaatatagcgattaataagattttcgagtaattcctgttgcccacttcgatgtttaggttcctgaactaatgtttctgcatagtgagccacttcatcaagtgtcatttttccttcaagaatatctctacctaattcactattccaaccagaataacgctgagcgacatattcatctaatttaccgtctactaatattttcaccgcgctctttaatgataaagccatagtatcgatggcaccgatatgcccataaaacagatcatcaatatcaatactttgacggcgaacttttgcatcgaaatttaaaccacccgtggtaaagccaccagcttttaagatttcatacattacaagagaattctcttcgacactatttggaaattgatcggtatcccaacccaattgagcatccccgcgattcgcatcaatagagcccaatattcccaatgcaatcgcggtggcaacttcatgttgaaatgagtgtccagctaatgtggcatggttagcttcaatattcaccttaatttcattttctaaaccaaactgctttaggaaaccataaacagtcgctacatcataatcatattggtgtttagtcggttcctgaggtttaggttcaattagcaatgttccctgaaaaccaattttgtatttataatccacaaccatttgcataaaacggccgatttgttctctttcttgacgtaaatctgtattgagcaaactttcatagccttcacgtccgccccacagtacataattttcaccacctagctttttagtcatttgcataacttgacatacttgtgctgatgcataagcgaaaatattgagatctggattcgttgacgcaccggcagcataacgaggatgtgtaaaacagtttgccgttccccataataatttaacgccagtttctgcttgtttatctgcaagaatatcggacatgacacccaaattataaatatattcttttaaggaacaaccttcgggggcaacatcaatatcgtggaaacaataaaaaggaatattgagtttgtagaaaaattcaaaagcaacatcagctttaagcttcgccagttctaaagcatcaccccctttttgccaaaaacgctcaaatgccccagaaccaaacatatcagtaccatcccaacaaaaattgtgccaatagcagacggcaaaacgcagatgatctttcatctttttgcctagaataatctcttcggggttgtagtgacggaaagctaatggattattactttgcctaccttcgtaactaattctatttactctctcaaaataccggtgcatatcagcctctctctaatatatacccgtcatctttcaagttgcttctttgttggctgcactctctcaccctggtcacatagtttgctatgctcccggggattcgctcccttgccgccgcgatccatcttgaaatccatagggtatagacatatgtgtatataaaattttgttcatcaatgtcgctattttcaattgcgttattttatttcttcattaagattcttgttaattgtgtgatttatctcataaattggcattaatttaaccctgaaaatagaaaaataattatgattaaataagggcatcaataatgaacagacgataccatataacactattacttaacgctaataaagcttatgatcgtcaggtgatagaaggaataggtgaatatttacaggaatttcaatgtaattgggatatcttcattgaagaagatttcactactaaattaaatagcctgaaaaccttacagagtgatggaattattgctgattttgatgatatagaaattcaacgttttttcagcccgttagagattcctgttatcggtgtcggtggctcttatcaccaagaaagtcattatcccgccgcgcattatattgcaacaaataactttgctttaatagaaagtgcgtttaatcacttaaaagataaaggtattaaacgctttgcattttatggtttacctcagacaagtggtaaacgatgggcaatagaacgtgaatacgctttccgacaattagtcgaaaaagaaaaatatcaaggtgtgatatatcaaggaatggagacgacaccggaagattggttttatgcgcaaaatagattaaaagattggctccaaactttacccccaaataccggcattatcgcggtaacagacgcccgagctcgacatattttagccgcatgtgaatatctaaatattcctattcctgaaaaaatctgtgttataggtatagataatgaagaaatagcccgttttctttcacgtacggcactctcttccgttgtgcaggggacacagaaaatgggctaccaggcagcaaaattgcttcataaacttcttaaaggctacgttcctaaaaaataccaccgccaattaattcccccgttaaaggttatagcaagacaatcgacagattttcgggcattaaatgatcccgcggttattcaagcaatgcattatattcgtcatcacgcgtgtaaagggataagagttgaacaagttattgatgctattggtatgtcacgttctaatcttgaaaaccgttttaaaagtgaatttggacaaacaattcatactattattcataatgagaaattagataaggtaaaaaatcttttaatccatacctctatttcaatcagtgaaattgttaccgtttgcggctattcttctttacattatttttactccatgttcaaacgaaattataatatgacccctaaagagtatcgagataaatataaaattaccaaaaagagttaaataagccaccctcaaacaaatagggtagcttttaatttaattaaatatcttcgccgttcgttgctataactttcttataccaagaaaaactctttttcttataacgtacaaaatccccatttccattatcatcaacattgacataaataaacccgtatcgtttacgatattcaccggtcgaaaaagagacacaatcgatacatccccatgaagtataaccgaggatatcaacaccatcgaataaaatagattttttaatttcagataagtgtgatgctaaatattcaatacgataatcatcattgataacaccattttgaggtaatttatcaacggaacctagcccattttcaacgataaaaatgggtttttgataacgttcatataactcagataaactgtatcgaatacctataggatcaatttgccattcccattcagaggattttaaataaggattgtctcttcctttttcgaagaaggagagggattggctatttttttctaacatttctgtggatgaagagacgatattactcatataatagcttatcgctaaataatcagcgcaaccttcctttaaccaatttaaatcatcatcttcaatatgaagttctatcttttttctttcccattctttaataagataagatggataatatccacgaagttgaacatcgctaaaaagatatttctgacgcatggcttgttgtgcatataaaacatcttccggcttacagctcgctggatataatggcgacatatggatcatgccgccaattttaaaattaggatttatttcatggcctaatttgacaacctttgcgctagcaacaaattgatgatgaatagtctgatacataacctgttctggattgtcataatcctgataaatcacacctgaattacaataaccaaatagtggatattgccaatttatttggttattaatttcattaaatgtaatccagtatttgactttatttttatatctttccataaccgtcaaactaaaattcatgaaaaaatttattaattttcggttatgccaaccgccatattccttaaccaaatgataaggcatttcaaagtgagataaggtaataatgggttcaatattatatttcaataattcatcaataagatcatcgtaaaattttaagccagcttcgttaggttgtaattcatcaccatgaggaaaaattcttgaccaagcaattgatgtcctaaaacatttgaatcccatttctgcaaatagtgcaatgtcatctttataatgggaataaaatttcacaccttgatgattaggatagattttattttcctcaataccatgagttatgacacgattaacgccgtgctctccttttgtcataacatcagcaatgctcattcctttaccatcttgattccaataaccttcaacttgattagcggcaaccgcgccgccccataagaaaccggtggggaatttattcttcataagtaactcctgattattatcttcatcaaaaatctttcttagttaaagataatagaattaatcgagttaggttccaaataaatagaccaaatatcattattataactaatatttattttttgcttttctttataagagttatttatattcaccacaagggaacctgttttattctcgaaagcaacggcatttcctgacatactaccttctaattcaatatgttgtgcatcaggcaaaattaaaccagaaaaatgacgcatgacataatactctggattatatatcacttcatttattccttttggaatacttatcatgctattctgtttccagccccaactactttctccacctgaatgcagcaccatattccagtacaaataaccattagcaccattggttaaataatgcctgaaaagggtaaagacataatgagcatattcccaactattatgaccatcaccacactcattttcagtttgataatatcttaattctggatagctttgtaccgttctttgaatagcattttttccttgccattgataaccaacgccttttatatatttataggcgtctatgtcacgcaatacacaatttgcataatcatcataatcctgtccaatttctttagagaactcaggggcattaatagtacctagccaaatctcagtttttacattattttgttcaaatttcggaccgagatatttttttataaactctcttaactgttcaccgctccacacacaagaaggaaatttttgatccgcagcaacttcattctggatatgaatttgatcaattgaaataccttctttctgatactcttcgataaattttgcaaaatataaagcatatgcattctggctttgaacatcgctttttaatctgccaaaattatagacttggtgagtcttaagccataccggcggactccacggtgaagcagatatttttaaatttggttgtctttttaacgcttcctttatatagggaatcagtaaatttctatctctttgaatcgaaaagtgtgccatattataatcatcttcaatatcatttaaactataccaagaaatggcataatcgctggcaccaataggtattctggctaatgttaatttgcattcaccatctggcgaaaataacttatctaacacagtttttttattttctttatccagatctaataaagctttcatcccaagttcattaaaacaaccgccaaagccatctaattttcgacctcgattattagtgacaattaaattggctttctcatctgtttttatgatcgacaatccttctttccattgttctttattatttgtatagataactttaatcatgatttattatttcccataaaagtattaatttattgaaattaattaaacataattatcttaatattagtattatgttatttcacaaatggtttaacttaattttttttttgagtttcatcacatatcttttttctaagttattcttttattatatactaaccacttttgccaccataaaaaggaaattttatgtctctcgtaccatttaaacaggttgatgtattcactcaccgaccctttaagggaaatcccgttgccgttgttatggatgctcaagaactttcatcaatacagatgcagggcattgccaactggaccaacctttctgaaaccacttttatccttccggcagaaaatccattagcagattatcgtgtccgaattttcacacccggtagcgaacttccttttgccggtcatcctacgatcggtaccgcacatgctcttcttgaagccggcttaattcaggcaagagaagggcgtattgtgcaggaatgtggggcgggactgattacattaaacgttaccgaaagggatgaaggtcagaaattaatcactttcgaactaccagaaccaaccatcacaccgcttagttccgagcagatagatcgcctcgaaagcattctagattgcccgttagatcgcgcgctaacaccggcacttatcgatgtgggagctcgttggattgtcgctcataccactggagcagaagctgtgctggcaacaaaacccgactatgccagattacttgaacacgacacgcaaatgaacataaccggagtttgtctgtacggtgcctatcatgaaggagcagaggctgatattgaagtacgctctttcgccccatcatgcggtgtcaacgaagacccagtttgcggtagtggcaacggcagtgttgctgcatttatgcgccaccacaaagtagcaatgattgacgataaaatcgttcattcatcacaaggcaaaaaacttggccgtcagggaagtgtatggcttagccattctgatggtaagatttttgtcggcggtagtgctgtgacttgtatcaatggcaccatcacaatctgaaaaaagttatcagccctaatatgtagttcagaaagggcgcttgttttgtcggaaaacagatgttttccgacaagcgatattgatttcaattctctctaaatatgctagaaaatcgcatagagtaataagattataccctatggatttcaagatgcatcgcggcggcaagggagcgaatccccgggagcatagataactatgtgaccggggtgagagagtgcagccaacaaagaagcaacttgaaagacgacgggtatatatatactttattagtacagaataataatgttaggaagtcagaccatgacgaaacaagctgtttttacgatgaaattagaacctgaactacgtgccgaatttatggctgaagccgaagctgctcaccgcccagcctcacaggtgctacgcgaactcatgcgcgagtttattcaacgccaacgtgaggaacgagaatacgataaattcctatgtcacaaggtagaagcagggcgagcctcaatgcgtgctggtttgggccaatctaatgatgaggtcgaagccgagtttgccgcacggcgtgccaatgtggtgaaccaagcgtgaaagttatctggacaccagaagcgaagcaagaccgcgctgacgtgtgggactacatcgcagccgataatccatacgcggcagccagaatggatgaacagtttagtgatgcagcatccaatcttgcacgacatcccatgcttggccggccggggaaaatgccaggcactcgtgagctgtttccaaacgagagttatcgcctggtatatgagatcaacggagaaatagtatggatattgacgcttatccatacagccagacagtggccacctatgcacaaaatgaagtagtagcgaaaaccattgacgataaacgcgaaactttacttatcaatgcctgtcactgataaaaggtagagtaaaagagctagaccgtagcgaatattaaaaaactaaacaaccacctactaatacaccctatggattattagataattcagaaaggccgcttattttgtcggaaaacagatgttttccgatagtaattgaatggtacggggaatgggtcattagtagatccctaattcctgagcctgattagctaatgccttcatagcctccatactctcagtattacgctgctttttatattccatcagatcagcaaaacgaatacgccgatgtcggcctgttttatggaaaggaagacaaccatcttccagaagtttaaccatatgaggccgcgatacattcaatatgtttgcggcttcttgagtggttagctcggcatgaacaggaacaatttgcactgcattacctgaagcgagttcactcaagatttgcactagcatagtaagcgcagatgtaggcacttcaatttgatgagatttatgatcatcactaataattgaaatctgctgagtttcaagttttgttgaaaggaacgctgaaagttcacgcagcccctttccagctatttcactttcgcgtttagccggaagatttatatcagagaaagtggaagtaatcatgttgcacctgttagtcattcattttgacttagcacattaaacgaaataaacgaaaatcgcaataaacgtaacacaattgttttaagcagaatctgatacgtttttcgcaataaccatttccaaggcaactcttctcgaagaaagaaccagatttagcatatcgttcgaaaaacaccaaacctgcaatcaataatgattttaaacccacattaaataattccatcctgacttcaagccaagattaaatgataatgaatccacgttatttgataatgaaaatgcccttttttgacggatatactgaataccgtaaaacatatttttgaattaatggtgatatcgaaaccaacactctataaatatatcgatgcagcaagactatgaaaactctacttatatgttatggaagattaaaaattataagtaacggattgaattaatcactattgaattaatttccattgaaatatttaaatgtgattgagtacagccaacaaagaggcaacttgaaagataacgggtatatctagttattaactaaacttaagggaatatatatgcataataaatttttttctttattgccagccacattatttttcttctcctcgttttccataggtgcaattcaggaaacgagaatgattaactttgaaaataaaatttcattaccaagaagtacagaagaacaactatataaacttgggaacgagctgcatagcgcatctgttgacaagttgtactctgcaagatattggggcaaatatggtactttttcaaaggttggtatggaggttcaaggaagtctagcttatggaatggctctggctagttcatcggatcttgacattgcatttgtttataaatacaacaatggcgaatcgatgaacagactcagcccgatagaactaaaggttaatgctgtcaatgtattcaaggaagtttttggtagtaggtataattatactattaaagctcccgtaataaatttaagtaacagtacagaagatgtcgatattgcatttttcaacgttctgaacaactcaacacctttatgctctatcgataaaaggtgttctgaattgaactatggaaaagatcctgccacatcagaatggtatcgttcagaacgtcttagcctatactccgaacttgataatgttttcagtaaaaaaacacctaaaagagagataattaatcgatcaggaaaaatattaaaagtatggcgggagaaaattttttccgatcaagatgtgaaaataccctcgattgccttagtgaccatgatttacgatttcagtaaggacaagggcactacatataattacaataaatccacagatactcttcgtgatgtaaccagctatggtattactaagtattttaagaatgataaatgtgaaggtgctccaaatgcaaagattgacttgcctgtatatcagcaagatagaaacctcttaagtagattaaattcatcacaacgtatgaatacctgtctgaaattagttgaatttaataaagcacttataaaggcaacatcggctcatgtaagcgaagctgattcggttaaaattcttgagccttttattggtcagttttaaataaggtgcccaaaaatagttatgcaggtatgagatcagtatggcaaataaaacctcatctccggctttgttgaataaatcagtccaggaaaacaattcttcctggactataccttatagatttcaagatgcatcgcgacggcaaaggagcgaatccccgggagcatagcaaactatgtgaccggggtgagtgagtgcagccaacaaagaggcaacttgaaagatgacgggtatatatattttgtcgggacgactacccatgcccgtatcctgatgattccagagtgttatcgggccaattcttatcaaattggcctgaaacagagatgatgcttttcaacaaaaacagaattttttgtaaaatgcttcaacggatggtgtcaccgcagtcatatgcatcgcaccatgtatcattccctcaatagtttcaatctgcacggacacaccggcatctcttaactgctgagcataagcttcgccttcacttcttagcggatcgtattcgcaaagcaaaatagttgcatctggcagtccttcaaaatgcgttaaatgagaaggcgagataagtggatttgttctactgttgtgctcattaatgtatgcctgccaaaagaatgccatcatctgttttgtcaatacataaccttcaccatatttatcgtatgaatccgtttccattgatgcatctaaagctggatagaatagcaattgatagcaaatagcaggcccttcttggtttcgcgacatcaaacaagcggcaacggcaagattaccacctgcgctatcaccaccgaccgcaatttgttgcctattgataccaaacttttccgcattatcagtgacatagcatagagccgcatagaaatccgttagtggtaccggaaaagggttttctggggcaagccgatagtctaccgagaaaataacgcaacccattgattccgccagcttacggcaagggcgatcccaagcatcaagacttcctaaacaccacccgccgccatgagcataaaccagcgcgggtttatcactcatcttttcttttccatagggtacatacatgcgaaccggaatagggaaaccatcctctgcgaggacagtaaagctgctattatatgtcgcatcgttccattcgccctgttgctggataagagcatgctcaagaacgattcgaagttgttccaggggggaatcttctcctattgcaatttcaggcgtagaagcaagccatttttcaacatttttatcaagtggcataataataactcctctgtaaaaagtgattgccagatagcaaaattgttcggggcattattcagtaacaaaatgtccacagttagtgataattgcgctgtctagattcgatgacacttttttcattgtgagataaggtgcatctcgtgtcgcgtactcagctccaatagttaaaaccagcatagataattgtatacgagcaagacgctgatagtaatgagaataaaaaaagaccatcggagaaaaagaccttttaaacggtcttttttgtttcttttctcaacaaagaaagctactataagactcattaacaagtcttttggagtgtttttatggccaacataattctgtcagatattagcgcaagcattagtgaacttaaaaagaaccctatggcgacccttagtgccggggctggataccctattgcaatcctaaatcgtaaccaacccgtgttttattgtattcctgcggagctctatgaacagatacttgatgctttggacgatcaagagcttattcgactggtaaatgagcgtagagggcaggcattggttgatgtagatttggataattatctatgatctatagagtgaaattcacggaagatgcactcaaggagtggaagagacttgataaatcagtccaacaacaatttgctaagaagctgaaaaagtgctgtgttgaacctcatattccatcagttaaacttcgaggcatgccgaattgttacaaaataaaattacgcgcttctggttttcgcttagtttatgaggtcatagataatgtgttgattatcgtcgtagtagcagttggtaagcgcgaacggagtgaagcgtatgagctagcaagtaagagactaagatagataagggaatgtcagatgctctgtcgttagtgatgatgcaaaattcaaatctggattttcaatgaaactgaatttgaattcaaaacaatgcatagaataaatccatacaacaatatagaaatgacataattaaaaccaagataagaggtttatttatgatcttaaaaaatatcaatttgttgaaagttgtacttattattacctttgcaacaaatcaatctcttgcagcaaataatattacatttctgagtaatccttcaccgcaacatgtcaaggatatcggtaattttgttgtgaaacaaactgaaaaaccatttttttccgatgttatattattcgcagcaaatattaacaatagtatatctaatagccctgtactgttttacaacgataaaataagctcgatactcaaagaaaatatttccctagtgcggaatttgcaaaaaaagggcatcagagttcaactatcctatctgggcaatcatcaaaatgcaggttggtcatgtaatatgagtcaagcaacggcaacgaaacttgccaatgaaatggtaaatgatgtcgttaaatacggattggatggaatcaatatcgatgatgaatattcaacatgctatggtaatcgtcaatccttctattgggtagcggatgcgattaaaagccatccaaaatttgccaacaaaatactcacaaaagccctgtggtcagattatctctacttcaaggaaccgacaaatatagcaaatttactggatgcaggttacgagatgacttacatcaacaccagtgccagtaagctggttccatacgttaacttcgggatgaagaaagaaaatttgttgttgggtatctcccccgaaaaaaattcgatatcctcagtgcagaatattacccgctcagtcattaataacggatatagtgggatgatggtatggtcacctaatacaatatttacaattgaccaagcatctcaatattacaccaaaatcatcaaagcagaagaggggataaataaagaagttatctatgtcccggataccagcaaagacaatgcaagtaattatgaataattacattgttaatactttagttggttataaaaataaataccgttgaatttttgattttattttgtgtagcttgaaaaacagttacacattacccagtttgatgaaaaataataaaagggaagagaaccagtaatacgtactggtattaaccatccgcaagaatcgtgaagtaaatattttgtgaagccgtatgaggttatcttatgaagagcgagtttaaagagggatattgtactctctgtagatcaagatgtggcactgtcaacgaagttcgtaacgatacactgataaaaatccaacagaacccaaaacacccgaccggcaacgccatgtgcatgaagggtaaagctgcaccagaactggctcatagtcctaaccggattcttcatcctctccgtaggacaaatcccaaaggtgatgccgatccaggctgggaaaaaatcacctgggatgaagcgttgacgtatgttgctgagaaactggctttctataaggctgagtctggtgcagaatcggttgctttctcagtcacctcaccaagtggcacacctcttagtgacagccttgaatggatagagcgcttcattcgaaatttcggcagccctaacgtctgctatagtacagaagtgtgtaactggcataaagacgaggcacataagtttacctttggatgcagtattcctgtagctgattacagaaatgccgagctgatcattttatgggggcacaatccaacaaatacatggcttgcgcaagcggaagctcttggcgcgggaagaaatgcaggtgccaaacttatcgttgtcgatcctagacatacggctcttgctaaagaatctgataattggctcaacatcaatcctgggacggatgccgcgttagccctcgggctaataaatatcatcataaaccgaagaggatatgatcaggcgtttgtagcacgctggacgaacgcctcattgttagtacgaaatgataatggtcttttcttgagagaaaaagatataaacatttcagctaagaaaaacagatatgttgtctggaataacataactcagtctccgctaccctatgatattcacgaaaatgtgccatgtgatgaaaatgatcattatgctttattgggcgaattttcgattaactctgcggaagatgtaaataaaaaaataccatgcaaatctgcattccagcgacttctaaatgagtgtcaaccatacacacctgaatatgtagaaaaaatcaccggcataaccaaagaaaaactcctatatgccgcagatttaatcatctcttccaaacgaattgcttatcattcttggacaggtgtagctcaacataccaatgcaacccagtctgaacgagcaattgccgtgctgtacgcactaaccgggtgttttgacactcagggaagtaacagggtgtacaataagcatcccgttaatcctgtaaatgctcgcagacttatgccaaaggagcagcaagaaaaagcacttggctttaaggaaagaccgttggggccacctctagatggttggataacatcacatgatctgtatcaagcaatcttgcacaaacggccttacccgattagagctatgatggcatttggtacgaatatgttgtcatctcatgctgacaccaaaattgggatagatgcgctaaaacagcttgaatttcatgttcattgtgatctctttgaaacgcctactgcacattatgctgacatcttactacccgtgaatacgccttgggagagagaagggctacgtgtaggatttgagatttcagctaaggcagaagaactcgttcagttaaggcaaaaaatgatttcgcctcggggagaaagccggtcagataacgaaattgtcttcgacttggcctgtcgcttaggcatgaatgatctattttttaatggaagcgttgaagcgggatggaattatattcttgagcctattggcttaaccgtagaggcgttaagagaaaagccagcagggatttcaatgccattaattcagcatgataggaaatacgcaggaatcgatcctgttaagaacacagttaaaggttttgataccgaaacaggagtggttgaaatctattctgaaaaattgtggcggcatggttatccgccactaccaatatatgatgaaccaaaagagaatttaaactctgagtcacatttcccttatcgactaacctcggtaaaaaatggtttctattgtcatagccaacagagaagtttaacccgtctgcgcaaaaaatcaccttatccgaagcttgagataaacagcagattggctgaaaagaaaggtattaacaatggagattgggtagaggtcatcacccgcaacggcgaggcacgttttaaagcatcgttagatgataatattgcttacgacacgataattgctgagtttggttggtggcaagcgtgtcccgactatgggaaggaaggttttcccgccataggaaaaaacagcagtaactataatgcgcttatttctgacgactcttgtgatcctatcagcggcgcttctccgctccgttcattccgttgtgatattaaactcgcagaagatatcaacccggagagaaggccgtggcagggccgtaaagcatttcgggttgtagatacaaaacccgaggctaagggtgtcaaaaccgttatttttgagtcacaagatggaacaatgctgcctgattatgaacctggccaacatatcacagtacaagtttccatacctggacaggatgcccctgtcatcagggcctattctttgacaggaacggcaacactggaaggtagaaagagttacagtatttccgtacgacatcagaaaagcataacttctgacggagaaacttttgaaggtgtcatgtcttcatatattaacaagacactggtagccggagccgaagtgaatctgacgcctccgggaggaaactttattattccgcttaatgctaagcaacctgttgttatgttggcaggaggaattggtattacgccattcataagttatcttgaatctcttcccgctaacggtgaaaagcctgaactcttattgttgtacgctaatcaaaacagcaatacacatactttttccaaaagactaaaagagattgagtcaaaaattaagcaattgaaggtaatcaactattacagcaatccgttgccagtggatattgagggtattaattaccagtatcatggatatattactgcggatgccgttcctgaaacactgattaaacagcaagctcgtttttatatgtgtggtccggctcctatgatgaaaacttttgaagaaggtttactcactctaggcgttccgccttttgatatctataaagaaatgttccgatcgctaacgccggtaaaaattaaagatgggaagagttttgctgttaaatttgaaaaatctggcgttcctcttgaatggtcccctgacaaaggaacactccttaattttggcgaaaaaagtggtattaagatggcaagtggatgccgggttggacagtgtgaaagttgtgctgtgaaattaaaaagtggcgaagtacaacacttaaatggcgtagaaccttcagagcaaggaatgtgccttacttgtcaatgtatacctatctcagatatttccattgatgcctaaaaaaatactaaggtaacttacagcggcgttcagggagaaatgtacgatgacgacatttctccctcgctcattgtcgaggtcactgatgccgtcaaaaggataggggactgaatggcaaaatcagcagccaataaatttaatttatgtttagcgaaaattaagtccataaaataacttgtatatatttaattgaatttattgaaaataaatttaagcttggttttagtgagtttttatcatatctaagatagtaaattcagcattcagcactatttaaatcacaggctcaagtatcaggcataatcttaaacgtaatcatatagttgataacccaatctcccatataaacaccaatctcatatcttttaataacaaaatatgtcagtttgtaataaaataaataatgacatgattaatttatattaattaagttaaattggatttttaaattccctgtactactcttttctatagcagcttttgatttatataaaccgtctctgtctttgcaatataattaattgctgctacagatctatattattatcacggcaaacataaataacctgattatgttatttatatgattactatacctattatgtaagccaatgagctaatcacataattttaatattttattcataggatttataggtgaaattatgtcaacagaatacaagatttatattgtcaaccagcaagataaaaagaaaaagttttggtgttttctcagtgaaccacaatcagaagtaagtgataaagtgtttgctaactcatcaacttatatgacattatctaagtatgaaagaggagatgaaaacgcttttattattcctcttgaatttaaattgaaggctagttcacacaataaggtggtaggtattagttcacaaatatctactcattcccttagaaatatagaattagggagcgtatggaaggtagaatttgactctagcgaagaacatataaacccatccttaagtaagttgagtgaggaaactgaacctaaccaagtcggaattaaaatcaatggtttcgatttgacagaacaagaaatcaatcagtggtatagctgtcttacatttggtattaaatcaggagcgggttttattggctactcctggctcccatcacccagcgacacatatcacattcagcctaagatagagttttatgttaaaaccggagagtatattgagaatcagctcatcaaaatgagtgacgtgtctagcgattctgcattgattacagaagaaaattttgacaaaagaaaggagtgtacagttatttatacgactacaggaaagtggaaaattaaacctggtaagccttcacagttactctatgataattcattagtgaaaaatttggtttctgcccatattaatttaactgcatctcattctgctttagttgaattgatcgaaaaaaactatagtgagtataactccaggcaggaaaaaagagtatccgatattgaagagcctaccctttggtatataagtgcggtgattacccttgctgctggatttactaacgagatattaataccaatcttaaaggaaaaaatagtgagttatttgtatggaaataattttgaattgaaagagataaggattgttaaatctggtattgaattcatatattccttaaaaagagggggaattttaagagatagtaaaaacaataaatatctgttggatataaccaaggaagccttggaatttgagaagcaagaacatcacattcagagttataagattacaaattaacatttatagctataagattacaacttcaacatcatgcaataaatttgttcaccttattataacttcttatagggcggtatctccgccctatatttttctctattctgatttacaactgtaaaatagattaaagataaagtatttaaatatttaattacgtccaacattatttgttatctaataatactcgtcattgttggaaaataataggaggttgaactaaactcaaatttcattcttttggaaggagttatcgatgtctaaaacccattattctgaatcattaaacctaaaatctcactggatgccatttagtgccaaccgaagtttccaacgcgatccacgccttatcgttgctgccgaggggcaatggctaaaagacgataaaggacgccagatttatgacagtctgtccggtctttggacctgtggggcaggccatacccggacagaaattcaacaagctgtcgctgctcaattgagcaccctcgattattcaccaggctttcagttcggtcatcccttgtcgtttcaactggcagaaaaaattgccaatttaacgccaggtgatctcaatcacgtctttttcaccagttcaggttctgaatctgtagataccgcggtcaaaatggtacgagcttactggcgagtgaaaggccaacccgagaaaactaaactgattggccgtgcacttggttatcatggtgtcaatattgctggtaccagtttgggaggtattggtggcaaccgcaaaatgttcggacagttaatggatgtagatcacttaccccatacattacagaccgatatggcgtttacgccaggtatggcggaaaccggcggcgcagaattagccaacgagatgctcaaattgatcgaactgcatgatgcctccaatattgcggcagttattgtcgagcctgtgtccggttccgccggtgcgattattccgcccaaagggtatctacagcgtctgcgtgaaatttgtgatcaacataatattttgttgatttttgatgaggttattactggctttggtcgcatggggcgctggactggcgctgaatattttggtgtgacacccgatcttcttaactttgccaaacaaattaccaatggtgccattcctttgggaggcgtagtggcaagcagtgaaatttatgaagcctttatgtcccagtctttaccggaacactccgtggagtttagtcacggttatacctattcggcgcatcccgtagcctgtgctgccgggttagcaactttagatctgttggataaaaaccatcttatccaacgctctgctgaacttgcccctcatttcgaaacggcccttcatgctctcagaaactgtccaaatgtgactgacatccgtaattgtggcttggtgggagcaattgagttggctgcccgtgacggtgataccgctgtacgtccttttgacgccagcatggcgctttggaaagccggtttttacgtacgctttggcggtgatacgctgcaattcgggcctatgttcaacgctgaacgagccgatttggatcggctttttgacgccgttggggaagtattgcatcacattgactgagggaaggatgtatatgaatcgtgatgtacccataaggtcttcaatattgttaaactcaaaagcttagaataaagcccaagagcacagctactcttgggctttttaagtttcaatccttccttatattatattggcacgctgccatgtcgcttcagagaacaggaccatcccgtccccatcggagttatgtgagagcatgacatcgataaaataaatggtttgaggagtggttaacatggtttcacaataggttgcgtcaaatgttgtccaacgctcacgaattacctgtgttgtcgcatatgcgtcagggacaacctggacattagcagcagtaaacaaagacaaattacgcgacgatgcagcaagcaaggtctgttttgtattattcgtcgcacttctcatatcgatatatgatcgaatcatcgacaacataccattacaaagataaaacacagaaatattgatcttctgccgatgaggattttgcatcaatgctcgttcaatatgggactcaatgtttgggattaaatctctggcaccatcaccaataaatgccagaatattctgggatgatgtacgagccaaataaggcagtgacatcaacgcatcgcccatcagtgcccggccataccaaccggaaaatcctttccctgttttcggtaaattccgcatcgccccgattccgcacctccctacatcataaacaccggtatagacaaatccctgctcactaatcagatgatgcaactgcttccctaaatgggcataaaagtaattgggggacatcggcacctgtggcaaccaatctatcggggtgatgttaggataattctgaactcgttccagttcgcgacgacgataagcaagtaccttttcatccacattaagtcgagtgagaacggtttttaagaatgagcgtaaatagctatgtacagctagatcagtgtaaggtgacatgtgctctaaacggcaattcacctgaataatatgacatttatttttaagtttactggcggaaaatggcgaggatgcttcatcgactttacttttaaggaaaaaaatactctggctttcaggatcagcaagctgctgcccctcatgtaggtaatgaaatactttgctgctaaagccgtaaaccgacagaattccaatatagttactaacaggcttttgctgatggtaatcactgaccgcccccggagatactagcgtatctactaacgctatccctgctttttcagcaatctgataaatcagttcacgttcatgatccgttaaatgacaacattgccacagtatacgacgcttatcatggttgatcagagacattactgcatccatgacggacgcttcattatccccaatctgtggaaccaaaaggctccactgactcggatgaggtagctgctcaggtttcagtgtacattccaaaactgattgtgtcgcaagaataaacactgggccgggttgagactgcaatagatctattgcctcatttaaccgctcaggcaagttcaattgatcattgatataaacgcacggaattccttttgcttcaatcgacttcttaccatcataatctctatgcatcgtaccttgaaatgggaaccagctatttccaggactatctgcacaaatgatgatacctggcgcatgagcacgtttcaggttgcataatgtgccacgaaactcatcgatcatgccggaagttaccgcaattacataaccacgttgatagaactgccagccacaaagtgcagaaactgccagactgtgctcattcggcccactttcacacagggtagatgtaccatcacacaaacgaagcatggaatcgataaatccggagatcatcgacccagtatagtagtggaagtcccaacgctccttgaagtggcactccatataatcatgaataaactgtgccattgatgatattgttactttagacgtcgtcgctctaacaagtaatggattaatataagtgctatccaaatgatccattaggttttttagcacctgtatctcccaaacaagcggatctggctgccaaatattgagtgtcactgaatccatctcttgtattcgtgcactaccaggaatcatctctgataaagagagcaggaaagaatagggtgacaatttcccaggattcgactcaaacaatcggaaaaactgatgactgacctgctcataatgtccatgttgtaaaaacagatcatcagcaattaccagatcgagtgttctgtccggatgccgtgcgatatcggccagagcttcatccagcgtttcataggtcatgacatgaaaagaaaattgatgctttttctgatagacaagtaaatatcctctagcttgctgaagcaagtacgtcataatagaatcaactgaaactgttgaattaagtttccaaacctcacaaggatcagattcggccgcaattgacaattccaacttgttaatcgcttctttcactccttggctcacgatttgggactgagcaaccacacaaattccgatgtaatgatgcatttactcgcttctctacaattaattatcaaaatattcatcttgattcttattcaatattgagtatacaaatttctattcttttttaagttttatgtgatctttgtaggtgtatcgcaaacacggagacaagtgggcgcaataatagccctattaaagatcagttttttcttggtcgaaagttctaatcttggaacaagcacttaattctatcttttatctagaactcagttgtaaacctgaataatataattacgtaatagtacaaagggggataccgactggtcgaaagtgaatcctcttcgtattggatcttcatattctaaacattaaaccttagagttaatttggtataacaaggagtagttatgaaaatattaaatattataattttatcgctatcgacagtgatagcttctaattctttagccgatgagattagagcaagggatttaggcattcctttctctggagtaaccgggaaatataatgcgattaccgatgttagtggtgtagaagttggctattcaaccataatagaaggcgatggaaagctagaggttggaaaaggcccaataaggacaggcgtaacagctatattgccaaaaggcaagaaatttagcccggtattttctagtacattctctttaaatggaaatggagatatgacaggcaatcaatgggtcaaagagagtggtttcctggaaacgccaatattaatcaccaacactcatagtgttggtattgttagagactcaacaattagctggatgattgataacaacctaacatcaccactgaaagatgatttattttggttattacctgtggttgcagaaacgtgggatggaatattaaatgatataaacggtatgcatgtaaagaaagaacatgtatatcatgcgttgaatagtgctaaatcaggagcgatagaggagggtaatgtcggcggtggaacaggaatgaacctttttaagtttaaagggggcacaggtacttcatcaagaattctagataaaaaagatggcggatatactgttggcgttcttgttcaaggcaactttggtgatagggacgatttgattattgctgggattccagttggtaaagaaatacaggatctcaagccgatatatcatggcggcaagaaaaaaataaaggatgccggttctataatcgccgtggtggctacagacgcaccattagcgcctcaccaattagaaaaaatagctaaacgagtctctcttggactagcaaaggtcggtggggtagccaggaatacgagcggtgagatatttattgcattttcgaccgcaaataatgatgctttctccagaaaagatgtaagaacaataaaaatactgtcaaatgacaaactagatcccttgtatgaggccacaataagtgcaacagaagaagcaataattaatgctatgatcgccgccaaaaaaatggttgggagaaatggcaatacttcgttttctattcctaaagatagagttcaagagatattaaaaaaacatcatgtcttagctcagactcaatctgacacttcaatttaaaacaaacaagttaccgactgtgattaaaggttgtaaatcttaagttgaagtcggtagctttcatgttccaacaatacgatgtatgcagtatcctttgttcgttatgaaaaacagggttataaagacagaattatttttgtgttgtcgttatttttaggagctgtaacccatattgtctgtgatgcattcacacacgataacggttttttttgtcgagataattcctctacctgtttaatcttgatcgaaagagaaatattatgtttaaggtcaatcaacactttgaatatatggtaaccaaaagaaaaataggaaatatgatcattcataacaaaagcaaaaaccccattattttaaacagggtttgtcagtgttcttagttaatacaaataagagactttcgatagaattttattttgccctaccttcatagtaagcagcataagcggtacgtccgttataattacaagatttaacaactccttttaaataccacttaatcgttttaccactatatttctgttcaaatgcattagcaaattttttttgagtattaacaacatgcctagtatacatcgagccctttttgtttatattctgactcggacatttttcaagtgccaatgcactcccaactcctccagttaatgtaatacccacggctaatgccccaactgttaataatttcttgaacataaaactctccttaaatagtttcagaatttatatatttaaacatattaattataaaatcatatgtgataatgtatgcaaaatataaatcatcacatcgatgatgttacaattttaaaattcaaaaactgcttatatttttcatcctaggttggaaatataacttccattatcttctcagtgtcttaaaaagcctctaataagaggcttttcggtataattttaaacttctctaccttcatagtaagcggcgtaagcagtacttccgttataatcacaagctccataacgccctttaaaataccatttaatcgttttaccaacatcagactcataccgagtaaatacattagcaaaattgtcataaggattaacaacaattctagaatacttcaagcccgagctatctgcgcctgctacgcttacgtcctgtcccggacaactcgctgccgatgcagtcccaatccctccaattaatactgttgctaatgccccaactgttaataatttcttgaacataaaactctccttaaatagtttcagaatttacatatttaaacgtattatttaccaaaatcatatgtgacaatgcatacaaaatctaaatcaccacattgatgatgttacaattttaaaattcaaaaactgcttatattttgcatcctaggtgggattaggttggaaacctaaattccatttaccataatagtagcagaaatcaaaaatggcaaatctaatatataatgacaatttattttcctatagtttttcatgaaactatctttaatgtcagtatatttaaacctctctggaatttatgatttatctcacatatttaatctagaaaggtaacaatctggtggtgttttaaataagggcaagtcggcgctgataattgagatcgtttatatttcactcactcacgcagaatgaattttctagtaataatgtcaaccaccctgactctggatgatattaatgtgattaacatcaaacatttttactcattattttttcagaataatcatggtaaaaaattctttttataattattgccttcaaatgctatatctattaattataatattcctgaataagtacttttatcgtaattatatgactaccaaataaaaacattcatgattctccaaaaatatcatttttatttttcataataaattcattttttatattttcatgtaaaaagtgaatttaatttaaaggttaatcgtcaaacataaccaaacatgagcctcaaaaaaataccagtgtgttcatccagaaaagtaggagaggagggtaacaacatattaggtaggaggaaggctatcccggcaacgccgggaaaacgtcgcagtatgcgatcgtggaaagcaataacttcttgagcactcacccaaatcatcggtcagtcaacgctgctactgtgtggccatgacgttgcatcatagcatcaaattcggcatccagttttgcattctgatacacctcgaattccgctttactgatcactacggcaacgctgccgtcccgacgggtgatttcaacgggctcaccattgactgcaatatccagcaccacagaaatattggctctggcctgattgaggtataggtttgcatagttaacccgaattctggataagaaattgacatgaagcctgttccaggagcaatgttttggtgcacgccgaaacagctccggggaggaacaggctatgaacaagttagttgaaattttctgcgatgtcgatgatttttgccgcttcttcattcctcaatgggaattattttgtttcgaaaaagggtaccgccagcgtcatcggcaaggccatatgcaccccagtgaaatcatgactattttgatcctttttcatatggcgcattaccgtgattttaaacatttttatctggaacatatttggaaatatcaccacaaagatttccccaccctgctcagttatacccgttttgtcagtgttgccccttccgttttggtcccactatgtagttatctgactcaattaaaaggaaaaccgaccaagattgcttttattgattccacgagtttgtgcgtctgtcataacatccgtatcccgcgtcataaggtttttaagggaatagcccagcgcggaaaaacatcaatgggctggttttacggcttcaaattacacttggttgttaaccatcagggcgaaattctcgcgctaaaagtgactcccggtaatgtgaatgatcgagagcctgtacgcgaattatcaaaatcgttaacgggttatctttacggtgataaaggttatctcagtcaggaactggccgatgatttagccaaaatcggtgtgactttcatcacgaagaaacgccgtaatatgaaagcacaagcgctgtctgagtggaataacttaatgttaaaaaagagatttatcatcgaaacgattaacgggcaattaaagaccatttctcaaattgagcactcgcgccaccgaagtataaaaggctttctgttgtgtgttttaggtggattgattgcttacagccttaaattgaaaaagccatcactgaaaattttctactcagagaaagatattttaatgacggcttaagcagaattcgggttagttatctccttagaaagagaggggtatcaaaaatcacctagttctatgcgaagttgttcatcgtctaaggttatttaacataatatacattatgcgtactatgattgtagcaccaatatagtcatgtcactttggtatacttaaaagaaaaaacccgcttttagttaaatccatatcaacataagcccaactgccgccggtacaatcttcattgcttagatggtcagcaacagttcccgcttgcgctggagcctcacccttttcgctcatgtattcaaaataagtatccaatgcgttttgagcaccgctaatagcgtcgtcaatagtatcgccagcaaagtaacatccgatcacgtctggcacaaaaccggaaaacgatccgtcgtcagcctgatgtaaataaataggatatctcatgcttacaccttctctttgattaaagagcggcctttcgaccgcttaattaagttatttcagtcctgcttgtttaagtattttaataacaatcaccgtaacttattctggaaagtcgagtatatcaacgtccatcgactggtgaatgacgcgtgaaatgaagatgtcgtcatcctgcaacatgtaatagatggaatgcttcttgaactcgaagcggcgcattcctgcgcatatccaatcacattccctaccaatccagggagatatggctagtaactcgaaagttcttttcagttcatcgtgataacgcttcgcctggttttgaccaaattgctgtatcgtataacgggcaatatgaaatatgtcgtcatcagccaattcggaaaacttatacatttaaatccttcgctgccattacaaaaatatcatccatgctgtttttgctgacaggagaattcaggccagctagcaccatttcacgaacattctgaatacgctgctcgcgagcctccatcaggcgcaaagcatcgcggacaacttcggatgtgttgccataacgaccagattggatcatatcaccaacgaatccgttgaagtgctcaccaagggttacactagttactcgtgccataaattcgtctcttcatgtattactgagtaatacaattataacaaggcataataatgatcgccagcggactatgttaatcccaacgctgacacgttttttcgtcttcgtacttgaatgatttttactcaacgggtttagaaagagggatatctttttgccccgcgtagaagaccacgagagtagcgccctctttgcctgtgtaaccgcgatgagtgctgtcaaccatctcggataacacctctcccgccttcataagacgtttttcaccactggattttttctctgccgttaacaccccgctcaacacgtaagctgcattaggtatcgggtgctcatgccaggcaagactggtatttggagcaatagtaattttgagaactgaaagctgaggagtgcctttagggtattcctgataagacacgccatcccaagacttttcagtctcaagcaatttttcaacgttaataccagcagtattgccgctatgggcttgagtgaaaaacggcgcaatgaggaaagcaaaagatgtaaaggctgataaagttcgaatagatagccgcatatggaatccttgtgcatagtgcataaattgggtagatgccctgtggagaaccataccatgcgcaccatgattactttagaactttttaagatacaactttctcccctgaaaactccgaaaacatcattacatcacaatgtctgttgaaatacttaggatttacttgaccggcacaaaggatacgagtatatatttttcataaattttttttatatatctgtattttcagcctcatatacccaatggatttcaagatgcatcgcggcggcaagtgagcgaatccccgggagcatagataacgatgtgaccggggtgagagagtgcagccaacaaagaagcaacttgaaagataacgggtatattcatttatctagatggatatcctagctttattaaaaagttagcttcttgttccatgcttttattttatataacaatttattaaaccagaaaatatgaagggaggaaggatgagcaatgttatcagagaaataagtgacgctaatattgcatatgcagcaacttttggtgataaaaaaaaccttggtttacctgctgtcaggcgatttgccatattgacttgtatggatgctaggttagatccagcaaaatttgcaggtttatctgaaggtgacgctcatattattcggaatgcaggcggaagagccagtgatgatgccattcgctcacttattatttcctataaactttttggcacaaaagagtggtttgtcattcaccatactaattgtgggatggaactttttacagacaatatcatgggcgatctactggaaagcagcctggaaagcgcgataatgacggatgaaggatttaaagatgtcggcaacggtacaggatcatctgaaggaaaatatatcaaatggcttactattaacaatcaagttgatagcgtagttgaagatattcatcgtattcgtacccaccctcttgtccccgcaaatatctccatatatgggtacatatttgatgtgaagtcaggaaaattaattgaagttcccgaagcagcaagcattgcagaagatgcttgatttatgatgggctttatttaaatttatccggcgtcaatgtggacaaggatgttcagttaatctcccgccctgtatagttaatcagacaacacgactaatcctcatcctccgttggtaaaatagcattgggtaaagcgctaaaagttccccaatagaaggcaattaaagagatcactgccactgccacaatatcccaaggcgcgggaataattcccttaccgccaaatgtgcctaaataggacaaaatgatcatggcactgtaaaaactaatcaaccataaagcagaggttatctgttgacgcaaactcactttgcctatcggaactttatttttaaataacaagtagataaaaaacaagataatctgtaatccaagtagccaagaaacggttttccaaccagaccagtaaacaatgaaggcggaaataataaaggaaagcggaccaatgatcgcaaaccatttaacataaaaaggacgttttatctccttggcattacgacgtaaggcagaagcagttactggcgctaatgcgtagctcagaattaacgccgcagaaacaacactgatgagtttttcccatgaaggaaaaggtaatgtccaaaaaacagaaagaataaatgtcaaccaaagtgcaggacgtggtatccccgatttttcatcaacatgggtaaacacattaaataacgtcccactttttgcccaaccataaactacacggggagtggcattcatataaatattcccggtaccacttggagagatcaccgcatcacataccaccaaaaaagcgagccaccccacaccgaggattaaggctatatcacgaaacggcaatgaaaaatattgcccaatgttattccagccactaaaaagtagatcagagggtatcccaccaaggaacgctaactgtaataaaacataaataaccgtagacagtgaaatagagagaatgagggcaataggaattgttttttggggtttttccacttcaccagcgacggaaataatgggcgttaggccaagataggcaaaaataatgcctccggttgaaaccgcagcttcaatacccgatatcccaaaaggagaaaatccgtgaacttgcagattactcggattgaaataattaaataggataataatgacgagcagcggaacgataaacttgaaaatactaataatattgttggattttgcaaaggttttcacgctgttgtaattaaggtaaaagaaaaatgctaataagataaattgaaccagccagcctgtcagagtcggatcacccgaacccggctgactgagaaaggggaaccacgccgccgcatattgtcgagcagcgacgacttcgatggctattaggctggaaaatgcgattaaggtgatggaacccattaaatatcccatgagttcgccatgagaaaacaccggataacggataatgccacctgatttcggcagtgccgcacccagttcgcaataaacaatgccgagtaacagcacggcgataccaccaatcagccaggaaaaaatcccggcaggccctgcaataacagacacatgactggctgcaaataaccagccagaaccaaaaatagcccctaatccgatgaaggttaaatccgtgagtgttaactgtttcttaaatttaccctgccctgaatcggattttggccgtgaagaggctttgtatagcgccataattattcgcccttttctgtttcttatttgatatacgtcaaagtcgggtaactgcgcgttttacaacacttcccggctcatcaccccattgattaatcgagaaatatttaacggattatggtcttgcagtgcgagtggaagtaaggatttaggatagttttggaagcagactgggcgcagaaaacgccagatggccagtgtaccaactgaagtccctctcacatcggaagttgccgggtaaggcccgccatgaaccacggcatcacagacttcaacgcctgtcgggtagccattaacaaccaccctgcccgcaatgttttgtaatcgtcgactgagctcatgtgcattcgctaattcatcgtgctcaccaattaaggtagcggtaagctgcccctgcaaacagtcaattgcgcgtaaaagctgatattggctttcggcttcaaccacaatagcaacagggccaaaaacctcctcttgtaacagagcatttttattcaacaataaagcaatatctgcacgatacaacattgcacttgcctgattttcatgatgttcgccaatggctaaccgtgtcattaagggttcatcatccagttgatgaatacctttttggtagttaagtaatgtgccttggttcagcattgactgcgccgggcgaagcgtgatttcccgcgttaattgagtaataaattgatcaaactctggtgaacgaatacccaagattattcctggcttggtacaaaactgaccgctacctaatgtgaatgaatttgccagttcttgggcgatcggtttcccccgctgtgctaaggcgtttggcagcacaatgaccgggttgatactcgacatttcagcaaaaaccggaataggttgtggtcgctgcatcgccatatcgaacagtgcacgtccaccagcaagtgaaccggtaaaaccaacggcctgaataatggggtgtttgactagatcggcccccacgctattgccataaatcatattgaatacacccgcgggcatttgtgcggcgataatagcgcgtccaatggcttctgcgatgatttcggcagtagccatatggccactatgtgctttgaaaacaacagagcagcccgccgctaacgctgacgccgtgtcaccaccagcagtagaaaaagccaacgggaaattactggcaccgaaaaccgcaatagggcctagaggaatatggcattggcgaatatcaactctagggaggggttttcttgcaggttgcgcagtatcaatgcgggcagcatgcatatcaccacggcgtaacagcgtggcaaacagcctcatttgcccgctggttctcgaccgttcaccttgaattctggctggtggtagcgccgtttcttctgatacaagggcaatgaagtcatcaccaagagcatcaatttcatcggcaattttatctaaaaaaacggcacgttcttctaacgatgtctggctataacgggtaaatgcatcggcggcggcttgggcggcgagatcgacctcatgtcgtgtagcttgataaaacgcataacccgttggtgcgttatccaccgcccgccgactgtgcaaacagcgttccccctctgcttgcctgcgaccaccaataaactgcctacctgaatgtgttaccaacatagcgcttcctccaaggatatcaaaaacagttaccgctccattcagagaccgacatcaggcagtgaaggacgattagcaagggcttgttctacaatggcgcgaacttcagccaatgtttccctttcgagaggtagacgcggtggacgggtaatggcactcccacggccaaccatctcttcacacaacttgatgcattgcaccaaatcaggacggaaatccaaatgcaacagaggcataaaccagcgatataattcccgagcttcttcataacgtttctgtttagccagacggaataaagtctccccttcccgtggaaaagcattcgacatacctgaaatccaaccttccgcgcccactgcgactgactctaaaacgacgtcatccaaaccagcaaaaagaatgaagcgatcacccgcttcattgggaatatcactaaaaggacgggtattgcctgatgaatctttaaatgccacgatattttcgcaatcggccagagaggtcagaattttcggcgtaatatcatttttatacagcagagggttgttatatagcatgacgggtaaatcggtagaggccgctattgtacggaaatacgctcggttttctttcggtgttggcgtataaaccagtggcggcatgatcatcactccattagcccctgcctgacggcattcagagaccattttgcacgcattatcggttgtcaattctgcgatacccgaaagaacgggaacttttccaccagcaacatctaatgcgagttcaacgatagtacgcttctctttcatagacagagatgtattttcccccacagaaccattgacgactaaaccggaaaccccatctttaatcaggttggtcattaccttctgtgtggcatccaaattaatggaaaaatcggagttaaattgtgttgtcactgctggaaaaacaccatgccaattaacttttctcttgttcatcgctctatcctttgatcgccattgatttacttgatatttagaatacgaattgtttttatcttgttaaaaaaatgtgattcattggttttaatggaataatggctatttcactacagagaagcttgtcacttttcacagtaaacaatgacgaaattagcataataggaatggcaaacttattggatcacaaaagaacggaaagactggaagcatgagtaaaacggtaaattactccacccctattgactgacgaaaatcactgggcgtgagtccagttgaggtcttaaattgccgagtaaatgcgctgtgatcggtataaccacatcgcaaagcgacatctgtgataggtaattccgtcgccagcaattcagacgctttttcaattctaattttgtggatcatctgccgaggtgtcaggtgaaagatacgtttacagtaacgttccaattgagcaaccgagaggcatgttaaatgagttagctcgtcgaggcgaattgttcgatcaaaatgttcacgaatataatcatcgacgatagccaacttttggtacacagggtgattttccttaacttccatcaaatcatgagaaattcctgccataccaataatgtgattatgttggttatacaatggcaatttatatgtcatgcaccaacctgctttgcgtccatgataaaagtggagttccagttggttttggataattaccccttgatgcaacacacgtaaatcctgttccgtgtaacaactgcccatctgagcaggaaagatttcggaagaggttttaccgagtagcgaagagatcgacttaaacccgcagcgtgtggctagcgtaaggttcgcaattagataacgtgctttaatatctttgataaagaaaaccacgctgggaatcgcatttagcaatggtgtaattaaggcaaccgcattgagaatatcttgcaggttactgggtttgtgattaactaatccactacaaagcgccgctaaaaactcaacattacaagcatcatgaccatttgtgccaatgccgtttcggtatatattcatcatcgatatctccagtctattacccgtaaaataggatttttgactcgtgtctggttaatttgattttatagattaatttatacattgttcttctggtaaaaacagaaatcatcatcagttttatttataatttttcattgtgctgatttcagcatattgcagtatgaaattcatcaagcggcaaacgaaatactacgccactatttataccctatggatttcaagatggatcgcgacggcattaaaaatacgttaattgggtggctttatggcagataaacatgattatcagattgttcgcgtcattgattcacacaccggtggagaacccacccggacagtaatcgagggatttccgtctcttggcaaaggaaccgttgccaaacagtgtcaacgctttgaaaccgaatttgatcactggcgcaaggctctcattcttgaacccaaagggaatgatgtgttggtcggtgcacttttatgtccgcctgctgtacctgacgccgatatgggagtgattttctttaataacgcggggtatttaggcatgtgcggccacggcactatgggccttattgcttcgctccatcatctgggctggttgacccccagcaaatataaaattgagacgccggttgggatggtagaggcggtactccatcaggatggcgcagtgtctgtttataatgtcccctcttatcgttatcagcaaaatgtcactgtcaacgtgcccggtgtgggtgatgttaatggagatattgcctggggcggaaattggttttttctgatcggtcagcataacctgtttctaacccccaaccatatcgatgaacttacgcaatacagttgggccgttaggcaagcactggcccaagcggggatcaccggtgaaaagggtgagtgtatcgaccatattgaattgtttgctcctgataaccatgcggatagtcgcaattttgtgttatgtccgggaaaagcctatgaccgttcaccgtgtggcactggaacaagtgctaagttagcctgcttagcggcggatggaaaattgcagccgggtgagatttggtgccagtccagcattattggtagcgtttttgaagcccaatatcagtggattggtcagaaaattgccccagtgatccggggaacagcgcatgtttacggtgataacaaattaatcattgccaagagcgatccttttgtctggggaatcaatgtatgacgccctgccaaatatcggatgtcattatcgttggtgctggcatcgttggagccgcatgtgcttatcagttagtacaggatggtttgagagttgttgtgattgataatggtggtaaaggggcgacacaggcaggaatggggcatctcgtgtgtatggacgataatcctgctgaattggcactgagcagttactcattagatatatggcgaacattcaccccacatatgccagaaaattgtgcatggcgtggatgtggcacactttggctggcggatgctgaggatgaaatggcacttgctgaggaaaagagcgcacgtctcgccgcctatggcattgagaatatgccgatgacagcaacacagattcaccagatggaaccgatggtgaggcgtgggattgctggtggtttgtctgttcctggggatgggatggtctatgcgccgaatgtcgtacactggtttcttgctagcggtaatgaaaaaattcagtttattaaaggccaagtgcatgccttaaagcctcagaccgttgtgctacgtgatggaaagaaatattgcgcgccgagaatattgttagcaaatgggctgtggagcacacatctgttacctgaattaccgcttgttcctaaaaaagggcaattggcgattaccgatcgttaccctacctgcatcacacatcaactggtggaattagggtacagcgccagtacacatgcatcgaatggcacgtcaatcgctttcaacgttcaggctcgccctactggtcagcttttaattggatcttcacgccagttccataacgaaaaacacactattgatctcggactactccgttctatgctccagcgagcacttcattttttacctcagcttggtcagatgaatattctacgttgctggtccggctttcgtgctgcaactccagatggcttgcctctattgggacagcatcctgcttatgaatggctatggctggccgtaggccatgaaggattaggtgtgacgaccgcaccgggcagtgccaaaatcatctccgcattgatgctgaatagcaaaacggagattgatcccttgccttaccagcctgcacgttttactgctatggcccatcagaggttgctatgacactcaacaaacccccatttattgctctgtttatcgatggcgaattgatcaccgtgcctacggggattactgttgcggcggcgctagcttataccggtgatgaacattgccgtatatctgtatcacatcaattaagagtacctttttgtggtatggggatctgtcaggagtgccgtttgatgatcaatggtcaccactgtgtcgcgtgccagacagtttgtgaaatgggtatgaaagtcgagaggatctgaacatggcaacatcatcttcttctacagtattgcgttgtgatgtgctggttattggtgcaggacccgcgggattagctactgcacaggcggccatacaagggcaacaatccgttatcctgattgatgacaatcccagagcaggcggacaaatttggcgtcaagggccatttcatacattgccaccgatggcgaaacgttatttatcagtaacatcagaagatgccctgatctatttacccggttgtaaagtgattgcagtagacaaccaatgtgtgattgttgaaacggcaagccggcaccgaatagttcactaccaacgcatcattctttgtactggagccaaagaaaaattacttccctttcccggatggacattaccgggtgtcacaggtgcaggcggattacaggcgttgataaaaagtggtctccctatgacgggtgagcgtgttgttattgccggtagcggtccccttttgctcgcggttgcgcagacggtaaaaaaagcgggaggaaacgtagctggtatcgttgaacaagcgcctttgtaccgcttattttcgtttggcttgcagttgttccgctggcctaacaagttgcatcaagccatcacgctcataccgcttaaaaattattacaaaaacagtatggtgttgggagtggaaacctcggtagaaggcaggttgactggcgtgtatatcagcaataaagggcagaagcagaaactatcctgtacgcgtttagcttgtggttttggtttaagacccaatacggaattggcacaattgcttggttgcttgctggatgaacaaggaaatattcaggtagatgcgtggcaacagacgaccctatctggtgtatatgccgcaggagaatgcacaggtattggtggcagtgagcttgtactttgtgaaggatttattgccgggtttgcagcaagtggtcaatgcgctctggctgaaaaatggcggcaaaaacgagtaaaatggcaacattttgcaaccgcggtggcacagacgtttaaattgaatgaagagatcgcacgggcgcttccacccgataccttgatctgtcgttgtgaagacgtacatttaaacgagcttgaaccctttcaggattggaatagtgcaaaaatggcgacgcggtgcggtatgggggcttgtcagggaaaaatctgttctgccattctccacgatatcaaacattgggcaataccctcccctcgcattccactatcccctaccagtcttgaaacgctggcagcaggagacacggaaaaaattaacttttctgattgatagataaatatcccccttcgtttatcaaaccgaattcccactaaaaatcacagtttgtttggtcacctttgctatgattcacctcaaaaatcattaaaacctgtaatgagttactttagagattgaggtgtgaacatttatgcataagacaaatggaaccattttagatgtaccgggtgttaaggttggacatgctgaagatgagttgcaacaaaccggttgtagcatcattattttcgacgacggcgctgtttgtggcgttgatgtcagaggctccgcaccggggacaagggaaaccgagcttttagatcccattaacactgtccagaaagttaatgccgtggtgctaagtggagggagtgcttttggattagattccgcctctggcgtaatgcgctatcttgaagaaagaaaaaaaggttttgatgtcggtgttactgtcgtacctatcgttcctgccgcaataatttttgatctaaattttggcgatcctgcggtgcgtcctgacgctaaaatgggctaccttgccgcacaaaacgcttctgtaaccccttttccatcgggaaatattggcgctggcaccggggccactattggtaagatagctggttttgacaaagccatgaaaggtgggcttgggaccgcatcggttaaattacctgatgggctaacaattggcgcaatggttgttgtaaatgctgttggtgaaatcagagaccctaaaaatggtaaaactattgcgggcgcatgtgatgaaaacggtcatcttatcgatctcattccctacattataaaaaataataaagataataatttcactcagggaacaaatacgaccattggcataatttgttgtaacgccaatatgaataaaagccagatgaaaaaagttgcccagatggctcatgatggtctggcgaggacaatataccccgttcataccatgagtgacggggatactatttttgcagcggcaacaggtggtgtggactcatcggtgaatattgttggtattctcgcggctgaagtcatggctgctgcggttttagatgcggtgaaatcagctaaatcaaaatttggtgttagaggttatgccgatttagcactttcgatttagcactttcgatttagtactttcaatttagcacactttcgatttaacacttttgaggtaaggtaatgctggtagccgccatgcaccagtagccttccaaacttgaactaccctaacaaactcgataaaaaggttaacattatgtcagacattcgcctgtatatgctgcaaaccggaaccatcaaatgtaaggttcacaacattaagatgaatcagggtaatggtgccgattatgaaattccgattcccttttttttactcactcatcctaacggccatacgctaattgacggtggcaatgcagttgaaactgcaactgaccccgaaggctactggggaactatcaccaaaacctactggccggtgatgcgtgaagatgaaggttgtatcgctcaagttaaaaagttggatatcgatcccgcagatatccgctatgtggtgcaatcccatcttcatctcgatcacactggtgcaataggacgcttccctaacgcgacacatatcgtacagcgacgtgaatatgaatacgcctacacacctgactggtttgctgctggtggctatatccgcaaggactttgaccggtcaggtctgaaatgggagtttctcgatggggaacgcaatgacatgtttgatgtttacggcgatggcacgttaaaaacggtatttactccggggcattcgccaggacaccaatcactactggtcaccctgccgaacagtggtagcctgctgttaacgattgatgccgcttataccctcgaccactgggaagaacgggcgctgccggggtttctcacctctaccattgaaaccgtacgttcggtgcaaaaactacggcatctagccaaacgcacgaatgcaatcgtggtaacgggacacgatccagatgcctggccaacattccgtcaggcaccggaatattacgattaactcgaatttgtcaatccaaaatagccagaaactagaaagtggatgtttctggcttggcactcattttacgaaagtttaaccaactatccgagaataaccgttattcctcgtcttatcctcttagccaatcattgacaaaagactgggcattttcagatttaaatcctatcgaagatatgccggttggcttccataagagctcgatagcacgaatcttttggttataatcaagagcattaaagatttcatttaattgttcatctaaaagcaaatctcgatattgaagaaaatattcatcattgaattgatcgcaacatccagcaaaaagcttattgccgttttcacgattgaacccacaacatctcacacgtttaaagccagcttgataataaaaatcgcatatttcatcatatctgtatgcgttgacgataggattcaaaaatgcatctacattaacagcaacctgatcaacactatcatctaaatgattagctgtactatcgccatattgatttcgacttaagttatcgcatagcttattcattaaatcagtatttaaaaaatactcttctgcatgattttgttttacaaaaatctgcaaaagttctcgctgcctcaatcgttcatattctcctatcgcgttgtatagccaaataagcgctatcccctcttcatttaatgaacgtgaagcggctaaaaaaccctcttgtggaaattccatatgatggataacaccggtagaaacaacaacatcaaattgattatctcgtgttagcttctcaatcgtattattttctagcgtgacgttatccaactgatgataagatatcaacttatctgccacctctaacgctttatccgtcatatcaatacccacaaattgggtatcgggatacatacttgccagccctaacaaacgatgccccgttccacagcctaaatcaagcacatattttcccgttaaataatccggcttaaatataagccttatcaccgtagccatatcataaataagattgtctccaatagcagaactaggatatggatatcggttatacatcgctttgacgtcctgattactcatatttatttctccgaacaaaatgacaaatcagtagtactagcctatgatcacgaataatagattacaaatgatagtatagatatcacccgcataaatttcatgacaacgagtaataaaatatttcataattgggagaaaaatatcttaaattcaattggaatagaaattagagagcagtggagttattaataatcacattaataaacatcttaaatagttgaagatcgaaacaagatgaatattaatttattcacacaaacatcatttactgtcatgtggtcttgaatacgtaaaatagacataaagctatattaacactcatatcactataaagtgttaattttatggaaaattataaaacttaaacattaaaaattcactttgacaatttaagcgatcaattttttaattaaatattgcttaataaacagagacataatttttttgccaactatttttagcgataaaactccaagctttcttgctctatttctatgtacagtatatttttattttaaatactacaaaaaagtcatggctgtaattagataatatcaaatagatataatcaccacgatttagccagaatcgctcgtatctacaacaggagaaatactatgcatgtcggcattattggggcggggattggtggtacatgtttagcccatggattacgtaaacatggaataaaagtgacgatatatgaacgaaactctgccgcatcatccatacttccgggttatggaattcatataaattcattcggtaagcaagcactgcaagaatgcctcccggctgaaaactggctagcctttgaggaggcatcaagatatattggcggacaatcccggttttataatgaacgtatgcgtcttctcgccgttcatggcggtatttctccaatggcagggaaaattatttccgaacaacgtttgtcaattagcagaactgaactgaaagaaatactcaacaaggggcttgcaaataccattcaatggaacaaaacattcgtccgttatgaacatattgaaaacggtggtattaaaattttctttgccgatggcagtcacgaaaatgtcgatgtccttgtcggtgcagacggtagcaattcaaaagtacgtaagcagtaccttccttttatcgaaagattcgatgttggtgttagtatgatcattggtcgtgcacgtcttaccccggctctcaccgcgttgctaccccaaaatttccgcgatggtacacccaatagtatcgtccctaaaagccccgactggttgttcatctctatgtggcgtgccccagtgaatattcatgtagaggcatccttagcggaaatcgataattttatcgtatgggtttacgtagcagcaacagatagtcttcctgacaatatcaccgatttttccgctgaagccctctgcgatctggttcaatcgcgtatgatttcgtgggacccaagcctacatactctggttcaacaaagtgatatggaaaacatctctccgctacatttacgcagtatgccccatcttctaccctggaaatccagcaccgtcacattacttggggatgctattcacaacatgacgccaatgacaggctcaggagcgaacacagcgctgcgagacgcacttttactcacgcagaagcttgccagtgtagcgtccggccacgaagagttagtcaaggcaatttcagattatgaacaacaaatgcgcgcatatgctaatgagatcgttggaatttcactgcgcagcgctcagaacgctgtaatacatttttcaataccaccattgaaacaacggcatttgagcataagaagaaataaatctcaaagtcatcaacaccgacgttaatattccgagtaaattgtcataccggaacgaattccatatcattactctagatacacttatacccaatagatttcaagatggatcgcgacggcaagggagcgaatccccgggagcatagataacgatgtgaccggggtgagggagtgcagccaacaaagaggcaacttgaaagatgacggatatattataaacgccaccagtagatatatcatactggtggcttggcttaattaattatgcaatttttacccaaggataagcatcagatgttcctgcaccatctggctcggtgcctctattccaccatttagcttcccaattttgattgttccaactcactctatcgccggccttatatgccctatttgcatcccagacagggtaatcactccctgtatcgggatgaatgggatcaaccggttcaacattaacacccttgaagtagaatggtgtcatatctattttttccgtgattaactcacaaccaagcccttccctcgccgcattgaccaataaaccacgatcttgatcggcggtccatgtaaatattcctcccagattcttttctagtgcatattgtgctttagatttaacggaacgaggggtatcaagagaaataaacaactgactatccttattatagagataatcagcgtctgctatttcatcggtatataagtcaaaattatttcttcccctcttttcttccaaatccagataattatatatcgtgtcgtaccattctgtggtccctgattcaaacgagccggttgtggtaatcttcggttcttttttcgggacataaccaggatcataactgccggataatggagaataactatcaataaccgtatttctgccattgcgtgaatagccggtgtaaccaatattaatggcagatgcaggcacaccaagactcaataaatattcaaccgccttttctacactattctcaccactaggataattgcggagattggtgtgatgtaacaacctttcagcccacggcgtaccaaagaaatcataggtcataacgttaacaccatatagcccaacttgcagtaattcaggtatttttgatttttccattttctctggtaccgccgaacaagcgatacttatttttatatctgaacgccctgcttctttaaaagcagcagttaaatctttaattaaactaacataataatcgccatcgtctgacgcatacatgttaccttcatttccagcaacgcccggatattcccaatcaatatcaatttcggtaaacatagggaaacgttggaatatatccactagactcgaacagaaataggattttagtgtttcgtctctgaccatagcataaaagccattactcatggtccaaccaccgacactaaatgacataataagatcatggccttgagcttttgcagcttgttgaactttagccaatccacctaatacgcccatacttttagattgatcgaaatcccttggcatttggatatcttgccaaccagaataagtacaattctgataagattggcaatctccccaagcatctgtgaatgtcacttctccattattggtgcgggcaaataatggcgcttgctctttaatttgctgcttcttttcgccctcatcacctaatattccacagaaaccaataactaatttatcataagcaaaaggattatctaaaaggtgctgtaaatctattcctctacctcgacgaatgggatcttgatttccttgtaatcgaccgtcatattgcgaccaatctgtataataaccaaaaactttaggtttatttcgtgtgtcatatttattatagactggtaatgcgattcttcccgatgtgtaactgaaatttattgtttcagttgatggattgaaattatctatctgataagactgttcactaaaagaatctgtctggattatttttgacataaatcacctcgactagatatcagtttatttttcgatgaacactccaattgctttatttacgtggtaacataattacattctagtttgtattcttaggaaaacaaataattgttatttgtttgattgttaatgatcaactaaaatttatgtcaacgggatttatattaccgaccatttactatcagatttcaaaaacaaataattgcaaattgtaaatatattaattgtcattgttacaattacctcctcaattaaatttgtaaattaatttttacgaaccatttattttaattttatttaaaattgactgctttttatattttatatctatactaatttgtatccttagggagttcgtttcttcaaaatattattaccattcttatatatggagattaaaatgaaagctaaagatgttcagccaaccattattattaataaaaatggccttatctctttggaagatatctatgacattgcgataaaacaaaaaaaagtagaaatatcaacggagatcactgaacttttgacgcatggtcgtgaaaaattagaggaaaaattaaattcaggagaggttatatatggaatcaatacaggatttggagggaatgccaatttagttgtgccatttgagaaaatcgcagagcatcagcaaaatctgttaacttttctttctgctggtactggggactatatgtccaaaccttgtattaaagcgtcacaatttactatgttactttctgtttgcaaaggttggtctgcaaccagaccaattgtcgctcaagcaattgttgatcatattaatcatgacattgttcctctggttcctcgctatggctcagtgggtgcaagcggtgatttaattcctttatcttatattgcacgagcattatgtggtatcggcaaagtttattatatgggcgcagaaattgacgctgctgaagcaattaaacgtgcagggttgacaccattatcgttaaaagccaaagaaggtcttgctctgattaacggcacccgggtaatgtcaggaatcagtgcaatcaccgtcattaaactggaaaaactatttaaagcctcaatttctgcgattgcccttgctgttgaagcattacttgcatctcatgaacattatgatgcccggattcaacaagtaaaaaatcatcctggtcaaaacgcggtggcaagtgcattgcgtaatttattggcaggttcaacgcaggttaatctattatctggggttaaagaacaagccaataaagcttgtcgtcatcaagaaattacccaactaaatgataccttacaggaagtttattcaattcgctgtgcaccacaagtattaggtatagtgccagaatctttagctaccgctcggaaaatattggaacgggaagttatctcagctaatgataatccattgatagatccagaaaatggcgatgttctacacggtggaaattttatggggcaatatgtcgcccgaacaatggatgcattaaaactggatattgctttaattgccaatcatcttcacgccattgtggctcttatgatggataaccgtttctctcgtggattacctaattcactgagtccgacacccggcatgtatcaaggttttaaaggcgtccaactttctcaaaccgctttagttgctgcaattcgccatgattgtgctgcatcaggtattcataccctcgccacagaacaatacaatcaagatattgtcagtttaggtctgcatgccgctcaagatgttttagagatggagcagaaattacgcaatattgtttcaatgacaattctggtagtttgtcaggccattcatcttcgcggcaatattagtgaaattgcgcctgaaactgctaaattttaccatgcagtacgcgaaatcagttctcctttgatcactgatcgtgcgttggatgaagatataatccgcattgcggatgcaattattaatgatcaacttcctctgccagaaatcatgctggaagaataaaaagaaaatcactgaaagtttttcaatcatctcttgactaaaaatacagaatcccatttatacccaatagatttcaagatagatcgcggcggcaaaggagcgaatccccgggagcatagcaaactatgtgaccggggtgagtgagtgcagccaacaaagaggcaacttgaaagataacgggtatactgatggtagaaacagtacgagtacacaagaggttttgtatgatcatttttgtgacaggagcaacttcaggttttggtgaatcaattgccagaaaattcattcaaaacggagctaaagttattgcgactggacgccgtaaagaacggttagaaaaattaaaagctgagctgggtgataacttttactttgttcaacttgatgtcactgatcgggccgctatcaaccaggttgtagagcaattacccgaatcactccgccatatcgatattttagtcaataatgccggtttagcgcttggattagaacccgctcatctggctaatttggatgactgggaaataatgattgataccaatgtcaaagggctcgtcaatatgacccgtgctctactgcctgaaatggtaaaaagaaatcatgggcatattattaatatcggttctaccgctgcaagctggccatattccggtgggaatgtttatggcgcaactaaagccttcgtcaaacagtttagtttgggcttacgagccgatttgcagggaaaaaatatccgagtcactgatatagaacccggcttagtgagtggcactgagttttctttagtacgttttaaaggcgacaatgataaagtgaataaaacctacgatggcacgcaagcattaaccgccgaagatgtcactgaagctgttttttgggtcgctaatttacctgctcatgtcaacattaatacattagaaatgatgccagtttgccagtcatttgccgggcttaatgtgcacagaaatgaataattacactcttcttgataatttgttgaacatcttaatgctatcttataatttatctatctgatagtttcttattgtgccatctaaattggctccactcacgctactctcaagagaattcaagaggataaaagatgaatatttgtaattctttgatattaaaagccatgccagctatcgctctggcaataccattgttatggcaaacgccagcattggcggcaacttgtacttctggaagtacctgcgtcacagtgaatggcaacggagattctgtgctcgataaagaagccgctcgtcaaagcaaagaacaatggaatgaaacaaagaatcttcgcactaaagttaataaacgtgccgagaaagagttcgacaagttcgataaagccattgatgctcgtgatacatgtatgaaaagtaccaatatcaatgcttattgggaacccaataccgaacgttgtttagacagcaatacaggtatgcccatcagaccgtaatataaggtgatgataatgaagatgaagaaagcgcttttatttagcgcactgctctttaccctacctccatttgcacttgctgcacaagcttcatgcgaaagcgtgaaagaacaaattgcgcagaaaattatcaataatggtgtgccggaatctggctttacattggaaattgttgctaatgaccacattgaacaagccggtggtaaaatcgttgggtattgtgaaaataataccaaaaagattatgtatatccggcaaggaagccaatcttccaagtaaacccacattctctttctgaaggaaaatacacaaaattcagagaaaatattacgccaatattttaccgttgatgaatgatgggatgaatagaggtcgaggctatacgccttcggccccttttcacattatctctatgtgaacagcggccatccttgacaagctgacctgaatgctagccttaatatcgcttcctatgtaaaccattagcttttttaaaactgacaatttaaataattaaatttaacattataacgttttggaatataaatattttctgaatatcatcatattgaaaatttaaaataggaaacgttatgggtgatcttatcactaagaaaattcgctttgccgtggtattttttatagcattagttgtatcaggatgtagcgctttcgcagaaaatcaaacagaagaccagaattttaatggcaacaacaatgcgcaatatgtaaaaatttatttgcataataatacatcacattcattagtggctgaaaaaacagacttactttggggaagttggattgaaaaaccatcgtcatcaatatccgcatatagtcacgattcatttgcctcaaaaggtaagatttttagtggcaccgagggcaaaattatttatcgtttacccaatggtgaagataagttaaatgttcactggaacctttcatattggggtgtacagaaccacaatatccatctctccgaggcatcaactcattataaacttgagaaaacagttaaaagctcatcttctttaggcatacagattgatatttatctcactgaaaaaaatataggcagcaattataaaattgccgtgatgtcagatcctcagccgtggcgtttagatcctgaacagggcgatcctaatgccgacaaaaaaccgtgggaagaattaaataaaaaggtagcaaatagtatcaataatatttatgaccgcaatcatcttgcttttggcattgttaatggtgatcttaccgagtttggacgcgctagtaccagaaaaagccttgaggagatatatacatcaaaaatcaaattcccgctatttatgggattaggaaatcatgattatgcaaataatgttaatgattgtacttatccagaaggttttgatttcagtcgtaatgcctgcgccagatctgctgtctttgatatggcagagagaataagtgattatagtaaagaattgaataatttctcctatgactatgataatgaagcatggaaaggcagtttatcttattcctgggatttcggggatattcattatgttcaattgcaaaactatcctacctataatgtcaatttggaccactatgtcagcccaaccgtttatattacaaaatcccttgattggttggaaagcgatcttgaatctgctcagacaagaggaaaagctgtagttttaaattttcacgatgggtatgaccattttattaataacagcagttatgctgaaaaagaaaaatttaagtcgctgattaaaaaatacaacgttatggctgttttcgttgggcattcacatttccttaaagaatacaccgcctcgatatttggaaatgcaagagtctatgacagtggagcactatttaaaggtgatttctttatcattgatgttaacaaaaaatgcatgcaaatatctgcatataatggaatagacggtactccaaagtttgttaaaaaaatgaccactgtttgtggtaaatagagatacatcgtactgatattttagattgataaaaaacctcactttctacaagtgaggttttcttattgattgcttatagatcacaatcacgatatttatgtatatacccgtcatctttcaagatgccgtttttagcacctgaaaatggtcgttaattccagacatcagcgagtccgctatatcaggtagcgttgtggtgaaaaatttgaagactttgtctcgaaattcatgtttatcagcgaaataacggttatttcgaacaggttcattcataaccttccataatcgttctatcgggtttaaattttggctatatgaaggaaggtaatgtcactcaatgttgctaacataagcctactcctccacaagatgagctttgttgtcacccgcaccatccacaataagatgaattttttaatattttccatttattaaccatcctgaattcgatgataggaatatttttgatattacgtcacaaatatcacccgctaaaacaccattatctcaagaggagatacaagctcatattgctgccggcaataaaagaagaaataaaaaaagcaaataatcttattattagggagtagcataggatgctcccctgataacattgctgataaaagatcacaggaaacaatgtacttgattagaaaaccgaactctttaataaatttacccgctcttaattaataaaaccgacaaagaaaaaaataacttgcataaaataacttattttggtagctataattgagaatactaatgtcaacaatgagggcaaactgaatgactaaattcatccttacgctgtctattatccttggtcttacagggtgtgtttcgcagaaacaaccactttctcttgattacatcgcaggtaatgaaacatttcatttatccaaaccttgtatagaacaagctcttcctgtaggagaagtcggtgatgatttagctgtgaatgccaataacatttttattaaggttaaaaaaggactgaattgtagtgaccggttcaaactttttttagcaagaaacttagggaaagagttgtttatttactttgacggtaagccagtcataaaaaccagacttgtttctatgattcatccagaagaaggcttccatcaagcagtagaatcgaaatcattgtcagatggaattcttagatccttgaattaatgaaaagcctatggttgctactcttgtgtttcatttatccatcaaaaaaagcaaaccataggctcaactttaagcgttgtaaatgatcctaatgacttgacctatagagtaacttttaaacctaatacgatccgtaccagcaccattattatccgtaatttgatgtgatccaggtcccgttgtacttattcgtttcactccagtcgatacgggatattcaatttcaacaccaaaagctgatggggccgatgagtcggtatctcacggtttataaaaaacacaaaataattagacagaaaattaactaaattctaattaatataaaattataactcattatagtaatattttatgtagattaatgagttattaaatgatatatatccaaaatggaggaaggtaatgatctccatttcggataaaatcaagcatcttcaatgattacgggtatatttatgtatattggctctctataccaacttcactctcacttcccccaacttgtttaaatatagtggcgacatccaggtagcaggataaatctttttcttctggacgtaaaatataaggaatttcacctaactgtggtgcattaatgtgacggcgtaacctatccatcactttcgtatagtgtgataaaccaggattaattctgttagctacccatcctactaattgcaatccatcatttattattgcctgtgcggttaaaattgagtgatttacacagccaggctgaataccaacaactaaaatgacagggattttttcctgaatcacccaatcaaaataaaaagtttcatcatccaataatacgcgccaaccaccgttaccttcaataataacgcgatctgctttattactaagattatttaatccttttttcatctgttcgaaatcaacctgattgccttcacaatagctgtttttccagataacagggttaatttcttcatatttaagcggaacaggagaagatttttgtagaatcacaccatctcgattacgcataccttcttctgtttcatacccttctgtggctataggtttataccctactgccgttgctccatcacgattaaaagcttgtaataatgcacgggtaacaattgttttacctatgttggtatctgtccccgtaacaaataggcgcgttaacataaattctgttttccataatgacagataaaacccggttaatgagcgcttaagtctagaggatgcaacgataagggagattgcgttagctcaatgttttgtttaattgctacaccaatttcgtaaaaaaaatttatataaagttaatattacaaccagaaaacctcttatcctttcattaaactgatcaacaatgaaccatcatataaagcttttttaactgatgctaccgtggataatgtacctgaattattgaattttgttggaactaattcaatctgtttgctataggcaggcaaagcgtgttgttgaatacattcactgatcaccggatacaaaacttgttgtgaagcattaagaggagaacccatcaaaattttttctgggttaaataaattgaccataattgcaataatatgcccaatttttactccaatatcacgaataatatcgactgccagagtatcaccgttattaaccgcctgacagaatgactcaacggtcagtggttcaccgtttagtaaagaatcgggtaccattgccaactgccgtttggctctggataaaatatggctgatacctacaaccgtttccagacacccaaaattcccacaataacagcgttcaccattaggttcagcctgaatatgccctacctccatgacaccacggttgccagcatgcaatgtttgccccgcaataatcacgccaacaccaacatgttcatcaatgaccatttggataacattctgacaattttttgctgtgccatataatgattcagctatcgtccaggcggttatttcatgttgaagaaataccggtaatccggtgcgacgatgcagatattctcctattggcaattcctgaacctggtaataagggaaactgtgaattaaaccttgagtcggatcaacaatcgcatttaccgtcatgctaattgccgtcagacgctcaagacgagattgatagcgaccaaaaaatgcatcaatctcatcaataatgctatctaaaaaggatttttccttgttggccggtaatggtaaaacatcttcaacaattaacgtgctacttaaatcacgcagtcccaatattaaacttcccaagttaatactgacacacaggaaatgccaactttcagaatcaagctttagtccggtcgccgggcgccctctaaatcctaaatccaaaaattccgtttccatgactaagtgtgcatcaaccaattcacggacaatcttagtaatactggctggagcaagttgcgcttttttggacagctcaatacgggaaattggaccatattgatcaattaaccgataaacagtaccaatattaatctgtttaatctgatcaatatgccctggttgtccatccattatttaccttcgttatactctaattaattcacgtttcaaaataattgttagctgattatgtcgaggttttaggtaaaaagtatgattcttgcaataaatatgtgatattcagcacgaaatttaacttaattctacttattttttccatgcaaaatattagatatgagtaggtttatcagcctgtctgcggcggccgatattggccggtttttgtgatttaccaaccagacctcagaacaagagtggttatcaactaatgaaatatactggacaccatccactttcattcgggtaaaagattcagtcacaacactgacgcctaatccagcagaaactagcccaagaatagtcatcgcttcgccggcttcctgtgaaatcatcggtgttatacctgcttgagcaagtaatgtgatgatttcatcatataaagctgtccctacttcgcgctcaaaaaacaccatcggatagcccgataacatttcgagctttattccctgtggagcatattccaacaaaggatgtccatcataaacagcaagcataaaaggttcccgaaataatagccgatactcaaggttatcgggtaattgagtattgcgcatgatgccaacgtcaatccgtccagtcagcaatggcgcaatctgctgtttagtattcatctgatgcatatgaatagcgacttccgggtaacgttcccgaaattgccgtaaactcagagtgaccttattcataaacggtatcgtagaggtgaaaccgatagatatttcgcctaattcccctttttgcattcttgctgcttttgctgcagcagcatcaacttgggccaggatctgataagcttctttcagaaacatgttacctgccggcgtcaagctcacattccggttattacgctctaacaaccgcgcatttatactattttcaagtgattgaatctgttggcttaatggcggctgtgaaatattaagccgttctgccgcacgaccaaaatgtaattcctctgccactgcaataaagtagcgtaaatgccgtaattcgatagccataatcacctttgagatctaatacatattattattaatgattaatatattagacaaaatattttgcaattcatatgcttgatcttcataaaaatacaaactagctaatgtgttaagtaaggaaattatgtgagcgccagccctggtagtaataatcgcagtatcaatgaaaatctgactcttggtaatcatcttgtccaaaatgctcaaaataagaaaaatcatattcagaaggacgatcctctgtatgttaaagtgacattgtcactctttaccgtagggttagctgcatttgccctactctatttcgttcaacccatcttacccatgctgtcggatgattttggtgtttctcctgctaccagtagcttatctttatccctttcaaccggaatgctggcattgggcttattaatcaccggtcctctgtctgatgctatcggccgtaaaaatgtgatggtaacagcgctattcgccgctgcacttttcactttactcagtgcatttatcaccagttggcatggaattctgattgtacgcgctctggttggcttgtctctcagtggcgtagccgccgttgcaatgacttaccttagtgaggaaatccatcctaactttgttgctttatcaatgggactttatgtgagtggtaattctattggtggcatgagtgggcgattaatatcaggcattatcactgattatttctcatggcgggtttctgtcatcgtattaggtttattggcattaattgcggcaatgatgttttggcgtatgttacctgaatcgcgccattttcggccaagttctctcaaacctcactctttattaatcaatctgaaattacattttcgtgataaaggattgccattactgttttgtgaagcctttttacttatgggcggctttgttaccctatttaattacataagttatcgtttattagattcaccctatcactttaatcagtcaattgtcggtatgttgtctattgtttatttggcaggaacatacggcgcatccaaagtaggtccattaacccatcaatatggactcggaaaagtgctgatcgcgacgataagtatgatgctaatcggtacgcttattaccttattctcatctgcggtgatgattatcattgggatgatagtcctcactttcggtttctttgccgcacatgcagttgccagcggttgggtcggacgtcgtgctcgccgggccaaagcacaagcgtcttccctttatctgttttgttattacttgggttcaagtgtagcaggcacttttggcggtatattttggctccaattaggttggaatggtgttgttttatttattaccattcttatccttttggctctactcttagggtttaaactcgccaaacttccagaggcaagataatagaagacaagcattattttatccgccaggtaatgtccttcactttctgatttgtcaaaaattaatgtgtttttttgccgcgatattaaaaatcgtgacaacattgttcaacaaaaaaacaaacattaatactcatatataaggaagagttaattatgggaaattccagatttgaaggtttcactaaagaggaaataaaattggcatatgaatttgatatgctaaatcaatctatggtgatggcagaagcgaatgcctatgcgttgcaaaagcagttatatcgccttagccaaccacaaaaactgctaaataaaataggtcggaatgcactggtagagattaaagatacgatgatacgttcagtgcctgcttcaatatgtgcagggttggcaggtactgctacagcatcaggtggccccgcgatctcttttctcgccagtgcggcagcgggaagtattggtggagaattggcaaaacctattacgtcaagaaccggtgttcatactcagttgtatccgacctgtaccggtaatacgattaaagacattgagcaagaggtacagggaaaattacagggaaaattgagtggttaccccaagctacatgaactataccgtacctatatcaacaaagaatatgcgcgggattttgtgcttgataccgcactggcaaatacacctgatgtggttaccagtgttataacagaaggtgtcaataactggacggcgggtactttcagttccatgctgaaatatggcccaatacctattgtggctttaactgcggcggcgggattagatcctcgtggtatttataataaaggcaaagatacatttcatgctatggctagcataaaacctggcccacacgcagggggtaatctgaaagcgaaaaaactggaaaaattactatgtacttatcaagaatatttaccctatctggagcaaaatttatttcgtgcacgagattgcttaacgaaattgattaaattgctgaacagcaatctggatagaaaattaaatgttgaagcattcatgaaaaaatcccctaatcttgtcttatcatataagaacgctcacatggcatctcaagaaattatcaatatgcttgagttattgattatgctggaaaaagaaagagaaaatcaggtagttagggaaacctgtttataaaattaatcctcttttaggtacgttaacgcaaaccaagtgacctaagagagggttttaatcaaggtggtgtacttgacggtatctaaagcaattaccaaccctcttggtatatacccgtcatctttcaagttgcctctttgttggctgcactcactcaccccggtcacatagttctctatgctcccggggattcgctcccttgccgccgcgatgcatcttgaaatccattgggtatatttacttggctcaatagccccaaccttgtttattatctctttttcacagtataatgccataatcggattaccgctaatactccacgatcaaaattacttcacattcatcacactgttagaaaaaataataaaatcccgagatttattcaggtaaatgcaaaatattcacctactgaaaaattattatcagcactgatatcaatattaaaataatatacagcaagattattctcatatgaaaataaacaggaactcggacaacaagaatacgctagattaataccttaaaaaccttttgggattttagctcgatatttctgcctacattgaaaaaaaatttccaacaacttttactcacctgttgcatgtaacgtttttttttggttatattatagacatcgttacatgtcacgagggtgaagtatgtttaaagaggagtgtcggcgtcaaagccatctggctatggcaacacaggataaggaaaccgatacactattagaaaatgcgataaatgaactagctgattcagcagactgggagtgaaatgggagaaaaaaatcatcatcacataacttcttgcaaaatagttttaaattcaattttcgacttctcataaaaggcgacacagacgtcgccccctagttattatttcgttcagcccgcagaatctttatattgtcaaacggcctcgtaacacattacgggtgttaatggacgattgactaaatagatttccggtactatttcgaaatgcttggttcacttcaacggctcgaatagaaggatgaacatttatcgcttctggctccgattgggtaaaacgagataaagtataggcttcacttccctcagaagtacctgctgatgagctgagttcccaagtatgatgattcactgcataagctgtacgtgcaagattaattagccccgccgttgttgatacagccccaaaacctaaagagacccatcccaagatattagccgcattagcattgttatctgcaacagcagaagccgctatccccgtagagagcgccacagcattcgcactcaatgatatcgtggataaagcgatatcccagcgtctgctagaacggctggcaatttcaccaaattcaataggtactgacccgataacactcgtgctggctacctgagaaccactccgtgccgattttatcagcgaagaggtaaaggttattgcgctgataccaaagcttaaaacccccaacccggtactaatccaatttaatatcccggctgttttcggatctttttctgataatgctgctgacgcaatccctattgaatcagcagctaatccaatgacggtcgcagtaactgcaaacgcactggtagaagcaatcgcccccaaagctccgcccgcagcaatgagacccgcactaattgccgctcctgcccccagtgacacaaccccaacaatgataccaattgcccccagcacaatacctaatatcccgccagcactaagatgaccgttcagatcaatccggttgataggatcgccttggcaataagtgtagggattaacccctccccggccaaaggggctccaactgtcgggactatgaaatctcatgagaaccggattgaaaacacgatatccgttacctaagaagtaccaacctgtgactggatcgacctgcgctccattcaaacccggtaatgaagaaattaaactcctaaagccataaggtgtgtaggataaagccatcaactcgttttcgttctgactggctataaccgtactattatggtcagtaccgtattgatagtagactgactcgccattcttggtgctctgatgaccaagccgttgtttatcactgctcagccaggtaatggtttcatcacccaattgaacattcgccacattgcctgaagcataatattgacgattaaccgtaccattcgctaaaacttgtgcggttaatttgttcaatgcatcatactgatattggcataccaaattacccttactgtctttgacctgtaccaagcgattattctgatcgtaaataagcgtttgccctttttcgtcgcgtgttagattaccgttagcatcataacttaactctatttgctgtttatcactggtaatacgaataagttgggttggatcggcttgactgaaatgataatccactgtttctttaccatctcgatatgtattatcaagccgtttgatattaccccattggtcataatggtaaatttgctgacttaacacacgaccagtatgatcaaccggagattgttctccctcgcattggtactggcttaagcgctgattactatcatattgataacgttcatttttcataaccaccccatcaatggaggtgatgcgttgactgatttgattattctttgtatagcttaaggtaatgacttgtattgagaagtcactaattagcgagcgttttatctctcgatcaaaaacatcgtattcaatttttgtggctaattgggataatgacgttgtgtcttttgtcgtcgttgttattaaccgtccaacattgtcatattcaaatgtagcgtattgcgaactctgttctgttttaactaatcttccttcggcatcgtagctataaacatgatcatgagcaaaactatctttatgacgttgaatcaaaccagacatcgtataacggtaatcgcccgatgaaatcggtttattatcccgcgaaaatgattcgtgctgtaatacacccgatggaaaataactgtaattgctctgggatacaccttctgtcgcagataataatgcccccgttttctgatagtaactaaagttttgttggcttgtctctgtggtaaatttggacatcacactaccgagagcgtaaagataatcgatgttttgtttattatgcgcaggcgtgacagactgaataggtttatcaccttgagatccatataaatattccgttttgcggccacccaccgtatcgcgggttacccgcccaagaccatcataaactaatgaacccaattgtgttccattcacattcagtgcagaaattaattcttcatggctaaagcttgcataagcggattctaatattgttctgtctggcaacgtttttttcactatacgatcaaatagatcgtactcaatttgggtagcgtaaccctctgcatctgtttcagtcaccgtacgaccaaatccatcataacgataggtacgagtgctatatatcgcaccatcaggatacacaactttaattgaagcaggctgttcaaagttattttgctgaatatttaacatccccaaccctttgaccccttgagtaattgtcctcgtaataggatcatggatttccagctctatccgaccatcactgtactcagtactgtaacgatttccccaaccatcatattgataggttttcgttgtcaccaaaggcgtcgtcaagcgagtcaaaggattagcagataaatcccataaccaatcatttgaaatctctttgaccaattgccccaaaacatcatattgtctggcaagaacttttcgatatgtgccttgataaatccccgatgttccccaaacaccatcatcatcttgttcttcaatcgagcaaatacgccccattccatcgtaatgggttttacgtctgatgccttgagaatcaatttctatcatcaccggccaaaaatcattttcgtcaccaccaggatattgatatatatagctacgtttaatttcttttgtcgtgccggggtcaataatttgtcctataattcggccagaaagatcataagactggtccgtaatgacatggtttacatcaactttacggagttgccgatgtgtataaatggaggtcacatttttcgattccatatgtgtaccatcaaaacccgtcaccgtagagtttgtagtcatctcactatctgaatattcatatttaaatgtggtaaccgtttgttggttattcatcaccgacgttatttttgctaatgaaccatgagatttgtttgtcggtgaattaacatagttaaaggtcctcactattttactgtctatcgtctctgaggctttactgacatattccttaacataagcgccggtaaaagtgggcagtttttgatacgtgtaggaagtcactctatttgcgacactttgagcagcatcaggtgatcctttttgcgtaactgactttaaaaatcgggaaaaacccaatggatcggcagggcaattattaccttcaccattcaccggataataaacgtattctttctgtatcccactggtctcagtaataagtagagtatttccccaatcatcgcttttaatattaacactctcttctcgtgaagtattggtctgtaagtctgtgtaacgtgttaacacatgagagggttgttgtaaattttctggttgttcggaaaagctttttgacggatcttcattataagtaatttctgttatgatcctcttattatcttgtgtttttgcttctttggtcattaaatgaaatttatcaaacactctttctgttactgaaataacattttgaccgtttaaaacacgttcaatggatgaataggtatatttccctgtaaccagatataaattatcttgactggaatcaaagcttgtccgaccagaagaatagcccaagaaattatgtactgaactatattcataggatttgctgatcgcaggctgcccattaccaggttgaatagtcaatgcagcagcataaggaatagattccgtgtctgtaactttatgcccattctctttataacttaccagctcaacataacctgttggtgtacgaaaagcgctaataaccggaaatattccttttaatgtctgataagtcatcttaaatctggcagaatcaataggaccagaagcatcataaggtacagtcacagtaatgaggtaatcattgcgataatcgaatgcgattttcgcagagatattattatcatctgggtattcaactgatgtgcaattatttccagagtaattgagtttaagataagttttacccgtcatacggtattttatttcggataatgcaaatcttgaattataaattaaatcaaatacttcaccatcaggaaattcaagtgcaaccgttttcgcaatatcacttgatccaattcgtttaagtgtctctataatgccatttttgttataaacataaaaggtattactatcgagtttatatacacgcaaatcttttaattttttatctttaaagctaatatcattattattaggtggcaatggcttacatttaaattgctctccatttgagcggctaaatgtaagtgtttttacatctaacattgttaatgaaaatcgccagccaataccaaatccattatttaatgttgttaatggcgagaatgataaattaagtacctgttcaatattgccgacattatttggtctcaacgtgataatattgatatttgcgctatattgacctgttctgggatcgacaccagtattaatataagatccaaaattaaatgcattggaatatatatcgttaactttcattttaaagttcccgtttgattaatatcacagccaaattaaatatctatttagccattcttttatatacaataatagaacatcttaattgctggtaaacgcacatgcgattaccagcatagataaagattttttactaaggaaaatcaacttattctcgctatgcttagcgcacgcccaatattaaccgaggatattctaaatttatgctggcaaccgtagttatcaatgattgtgacatcatgatatccatcgacataaccggtggtccatgaacatcctgttacatggagtacctcagcagcaagctgtgtgtcaggaacagttacatcataagagtagtccataacacatcctccactcatatcatttctagcatttacatatgaagttcctcgtttaaatactcttgctcttgtcaagaatctatcatctgatgaacttttaccaaggacatatatattattaacagtcctgtcattcccttcaagaatcctcaaatgatatggcaatgtccagcgataaaggttaattgtttgatgatgggtatccgatttcgttggttcttctgttttatcaaacaatatattggtactttcatgcaattgatttgcattaattgcataaggagcaatggcttttaataaaattttgctgtcaaaaacttcatcaccaaccgacatattcgttgttagtgtgcgcttcccattcgtatcttcgaatgtcatttttgccattaggtattctgtacttgtcctattactactaacataacaatagataatttcaggaacactcttcacactgttctgatagttttcatttgtacaacaatctcccgcacgatttattaccggctcctcagtaaaaatatcagcactataaacaccatttaataacccaagatcatatttatttctcgcatctgtcgttgtccatcctgaaggcatttttaattggtcatatatgaggctatcactcaatgcagccacctgaatcgatcttttttcagcatcactaagtgctaattttacccaatcaccattcttatattcttgtttaagtacagagatttttaccatacattgatgacgcccattagcataaaaattgtcatcagttttttcgatggtaaatgttgttattttcttttccatcacactctccataatattgtgaattaagctataatagaaagaatatcaagttcaaagccataatatggcccttgcaattcggtaataattctgactcgataacgttttgataaatcgtcttcaaattccttcaaggcgttcatgataaattcgctgtattttccttgtgcaaaaaagataaattgcgtggttgaaggattaatagaaacatatttacccaacgcatggcgtagcgtcttaataaatagtgaaccatcttcatttaattcgaataattttctatctgtcgtcgtcctatccataaaattgccttcacctaaaagataaatatttatctcacgatggtctcgacgcagtaaaaactgtttgttgatatccaattcgaatattcttggcttaatagttttatcaagtaaatgatctggaataacaaattcaatcaagaaacgacgcccattcacgataataggcaaatgttctcgatcaattgagaaacagcacaaatttccaacccatgaagagccttctgtttccgaatatgctgaatataaagcagcaaccttaccttgttctagaatgttcattataacctcttaatattaatggtgaaaaaacagcattaaatcaaaagtcaacttacagttttgattttacataattagtgagctcatctaatgttgaaatagaatgatctgaaaaaagctcagctttaagcataatgccatacgtttccaatacaaatacttgaatttccacatagtcaaggctgtcaaatttaagtgaaataaaataagattctggtgttatctcttcctcttcgatatccttcatcattaatattctattttttattgcagtaaaaatatcactttgtgttggcatttcgctttccttttatttcatcttagagataattgaaatctttgatacaaaaatagggtttttatcatataaacatcggtaataaaaaatacggatataatctttagggccattcttaatcagtaaaggtggatttaattcaacacaaatatttggagaagatcgtaatattgtactattaacaatgtcctccttgatcttaatcgcttgtccggtatgcaaagtaaaagattgattcagataatcctgtaactggttaaaatagtagtgttcaaaattaagaaaacttgtcgaattaatgacaagatgaaaaacaagcgcatccagaaaccatccaatagatgtgacactggggaaataatgtctaaagacagcatatttttcacaaacgccttcccttgttatcgtcaatttttggcagttatcttgaacaatccaatgttcaattgactccattgtattttctacactggtattgccggataacacactttttccgcacggattttccaatttaaacgttttgcttttagtatcaattctcaactgatgtggtaatgcagtataaacatattgacggaatgacgtatcaatattcagtattccagatgtaaaagcggaagttaattgagataactgttgcctgacataaagcagactcaacattccctgcacggggtactgctgcatattgtgcaaaaattcacttttctccgaataatggataggattaaaatccccagagaaattcgaccaatgttcaatatcttccatttcaaaaatcaacatatcagttaccttaccttagagataaccaacgcagcattatgtcccccaaaacctgcactgatattaagcaccacttctggttgaacggtgtagcaatgttgattaggtaaataattaaggtcgcaatctggatcagcccgatgtaaattcaatgttgctggcaagcaattttcagttaatgcctttacacagacaatagtttcgaaactaccggcggcagcaatcagatgaccggtataagattttgtgcttgatataggtacctgataagcatattggcctagtgctgctttaattgcctgagtttcataaagatcatttaacggtgtcgaagtaccatgagcattaatatagtcaatatcttccagcgaaatctgcgcctgctcgatggctttggttatcgataatattttaggttcaatatcttctgtcggccgggttaaattagcggcgtctgaatattgagcgtaacctttgatttcggccagaatcgttgccccacgcgcgacggctgaatcataatcttccagacaaaccaccgccgctccttcggccaatacaaatccagagcgatcaagactaaatgggcagcatgcgagattggggtccgtttgctctttcgacaatgcattcagtacatcaatactccaaatattacattctcgaataagtgattcagcagccccggcaatcatacattttgcccgccctgagcgaataatttcaaaggcatcacctatcgccattgtacccgttgcgcaagcagccataatggtattctgataaccacgtagtccatacatgatcgaacacgccgccgtcatggaacttggcatggtgataagattactcatgggatgagctaatttaacttccttatactggcaggcatgatctccggcattatcgacagctccccagccactaccaagtatgatcccacattcgtatttatcgtaatattcaacaggtgatacgttcacgccaaatgcttgggtaaaagcttgataagtcgctttcaacgccatttttccgcagtcagaaagcatatgagtcaacttttttggtaataactgataacgtgatggattgggtgcaaggaaagaaaagaaacgtgaattaatgaatgagttaggaaattcaattctgcgaaattgatgttgtttctcgataatactttgccaacatgattcaatatcttcaccaattggtgttacggtgcccatacctgtaataacaactctttgagttctctgcatattggttaccatttatacatagattgataatgtcaatttttctagctataaaataggctaatgaagacatatcaccataatcataaataagtattttcaatactcctggctaatataatcgttatttgtgaattacgtaaaactaactgatagattattttacccatgtaataaaaccgatgataaatatccataaacaaatatattattattttaatatcattatattcagcctacaaaataattgattacaccatattagactgtattatcatggtaaatcctaaaaatttatttaccattaactcattattctgtttaataaagcacatcattgtatataccctatggatttcaagatgcatcgcggcggcaagggagcgaatccccgggagcatagcaaactatgtgacgggggtgagtgagtgcagccaacaaagaggcaacttgaaagatgacggatataaaaacaaaatataaataatgactttaattattgcgcagttgtttatttcataacatatgaattcaatgattatattaataatctaacaatgtaattaaagaaaagagaaatagtaaatatttcacatcattcctgtgaataagtactgaggtacattgcccaatctttctctacatcaaatctgcatcaaaacatataccctgtccccttgtttgtaatatactgcccataactggataaatacacagcactgtgcatcttcattgtccagttaatgtaataacaccggagacaacatataccctatagatttcaagatggatcgcgacggcaagggagagaatccccgggagcatagataactatgtgactggggtgagcgagtgcagccaacaaagaggcaacttgaaagataacggatatatacccaatggatttcaagatgcatcgcgacggcaagggagtgaatccccgggagcataggtaactatgtgaccggggtgagcgagtgcagccaacaaagaggcaacttgaaagataacgggtatatggctgaaacaggcaaggatacaggagtgttcagtggtaacaaaatctgaggcaagccctgactcagtgataaagcagcagttcgataccctcaccgtcgataaaaagggtactcccaaagagtcgcttacacgttgtggcgaacctccacaatcagcaaagactcacttagcttatcgataagcttgctgaatacctgacgagattgaagatctaaattagcatcccactcatctaacatcaggatctctatcttatccactgctttaacagagatttccttaagaaattcccgcagttcctgcccagtcgacagattcctttcattagttttttcaaaaacaagttcatgatgtgccggaaggtaataagccgattcacccaattgctccttgagccagcaaagaaaagtagacttacccactccattcggccccctaattgtgattcggccagacgacgggactggcttaataataagttcttttaaacttgccaagtctggcaaagtgccatgagtttcgtatttcaaacgattccattggattcgttcctccaaattctgcgatgtctttggagtttctgcagcctgtcctagccccttgagcctcgcactcaatgccgaccaactcgtagaatagaaaatcacgacatacgcgtgctgaagaataagaacctggcgaggtaaggttgcaactagaaccgtgagaacagaaggattgtccatattctccaagaagagaacacttgtccagacaagtaccggtgccatcattagtagcattcccaacgctgaagcaagattattccagtattggctacggacggctgttcctaaagccaaactctgtcggactttcagttcactttgataaagagactggttgtatttattgcccaataggaaattgtcccacgccaaagataaaacacgttgaagggctgttctggcagattgtgcttctgcgccctttacatgaattctttttctaaagaaaaaaatgacgctcgaaacaaaggcaagaccaacaaggtaggaccatgcaatcgacgtatcaaggacaagagaaagagcaagtacattcaatgaaacatttagaacaacagaggcccaatcaaagataaatttggaactttcattaaaaaccagaaacccttctgaggacacatagggcaaatgatagtctttaaactctttactcgttcgaatagaagcccgattccagaaattaagacgaaacctttctacatatttttcaagtgcaagaaacttagacttctcaagaaaaaccgcagctaagctagaaggaatatagacgagtgtaagagaaagtataaaaaggacaagatacagagtaaaattctcattagcacttacctgttttgccagccccgctatccaataagtagaggaagccacaatcaactgttggacaataagaaaaagcaaagcaaaagcaaatgctttattaattaaaaattcaatagccgacttttttacttccatcttaatcttatttttctttcagtagatacaaacttcaattgtccactggaaattcctctgggaattcctgcataactgtgaagccaatgcgtcttaggttcgaatacgtaattacttaacttaactccgtctgcaagctcagcctcaaaataaaaatggatagcatttgcacgttgagacgccttgcattcgacggaatactctatatctgagctcttatccagtccaagattaaatcggcgaataagttttggttcagagcagacttccactccatctgatttgataattttttttctaattaaattgcagaataaacattcaaacccggacactagttctgccgggacaggaccaaatcgagaggcgtaactactcaataaaagatcaaaatcagcgttcagttcaggcaagtgtataaattgatatttaagactcactttagaaggaatcagcactttgatacttgagtgtctagtacaaaaatcgtggcagatctcaacaataccctcgtcgattccaaaataacccaaggtttctgtcacaagaacatccggcggattcttcaactggacatcaaaagattttttgctaatgtactggatattttttcttaagcccctattgagtatttgagcaacaatactactagcttccaacatgtctatataagtaactaatccattagttttctgagctaacatctgagttagaactccagttcctccccccaaatcaactacatgagaatcctcttgaacaatcctatcgattgcagttttgaagcagttcaaacgatgttcatcagcaagcattctcgaatggtacaaaagcggaaatgcttccatagagccttttatttcaaccattatgcaagcttcttctctcgtcctaccatcagatcaagatacccctgacacttctgcataattgactggcctctttccgtgattaaatccttataattaggaagatcggccaaagaatttaatgcttccagcgcctgtataagcatcttatccgatggcggatgaacgtggcatttttctggttctccgagatagtttcgtctcaccaaaagaacttctacagctacgacgatactatgaaagactttatcgatagggcgcttaatgttgagtattgctgattttgcaaaattggcttcattctggagaagcttgtagtcatggaagtgcaaatatcggagttcgtctataaaaactaaattatgagtaagttcatggaccaataattccgtgagatcttgtacgtgccagtgtttacggctgttgatccaaatcacacccacagcattcgaggtggaaccgccccctgaattctttgagtctctcagaaataaactatctatcgccatctgaaatacagcgtatatctgtggcatccttagcttcaattcttctaatgcagctaacaaaaactccagtcgttgcttacgaacatcgtcttttagactatcgccaatcagagacgattgatctctatcatttaacaaagcgtctgttcgataaagctctaccagcttgtcttccatttcaggatcctcgactatctgagttcctacactctctaaccgcggaacgttgggttgatagccctttaaaaaattatgaaatccaagctccaattcttcagacgttttgggagccgtttttgattttaatgcactaagaacagctagatttctgtaaacctcgttaataccaatgaggtgtatcacactataccccctttgaaaaaaagaggggatactgtcgaatcaaatcccccctatttataattagaccaaatcatcataagcgatcattcgaacatgaacgaaacagccttcctcattcctcataacttcaacattgtcttgtgcttgtatgaaatcaagttcgtttagatcttctaaaatctgttcaagagtagccatattctttccccctttttaaccgtagttaaaaataaaggtagaagttgatcagagttctgtcaattgagtatttacaaaaaattcatgggacgaagccaagttatagccgtttagttacagttataaacatgtgaatatgcttgaccactactcattcctcttggtagaacaagtcataaacaggaagctctgactattgaatacaaccataggatctggccgaataccattcgcgtacgtctttgttccattaaatttaaaactaaaatcccatttacagaagaaataatatcgggtattgcccaatttgtagtatcaatctgaaaaaacgcgttattactggagaaatcatgatgaaaaaaacaataaaaaacatatccttattcacaggaattgtgcttggaagcttgacattagctcatgcagcaattattccacccggtacacaactggcaaccaaccagaatattgttcgtcataatggctcagaacctgcttctcttgacgtgcataaagttgaaagtgatgttgagtttgatattataaacgacttttttagtggattaattagtataggaaatgatggtaagtttaatcctaatttagcgatccgttgggaaaccaacgataataaaacctgggtatttcatctaagagaaggaataaaatggtctgacggttcacctattaccgctcatgatgtggtttttagttggagacgtttaattgatccccaaatggcatccccgtatggcagttatattgaaaacatgtatatagtaaatgccaaagatattcttgctggtaagaaaaaagccaatgaattaggtgtaaaagcattggataatttaacggtagaagtaacattagagcaaccgctatcctattttttaaatatgctggcacacccagttatggttcctatcagccaaaaagcggttgagaagtatggtgaaaaatggactcaaccaaatgtgtttgtcagtagtggcccattcaaactctctgaatggatcgtcaatgagaaggtgattggcatcaggaatccacaatattgggataataaacacaccgtaattaataaagtcacctatcttaacgtcacatcagaaacagcggtggtaaaccgttatttagcaggagaaatagatattacaaagggtattccatcggttttatttaaatcattaaaaaccaagttaggtaatcaagttcatatttcacctaaattaggtgtttattattacgaatttaatacccaaaaagccccttttaacgatattagagtcagacaggcattaaatctggctttagacaaagatatcataacaaataaagtcttagggcaaggccaaaagccagcctataataatactccaccaaatataggcggaatgaacttaaaacagcctgattatgcatcatggacgttggcaaaaagaattgaaaaagcccggcagttattgaatgaagcgggttataacagaaataatccattgaaatttaatcttctttacaatacatcagaggatcataaaaggattgctattgcagtcacctcaatgtggaagaaaaatctaggtgtggatgctgttttacagaatcaagaatggaaaacaatgttagacaccatgcatcaaggtaattttgatttggtaagatacgcatggatagctgattacgataatcctgcttcgtttttaaataattttgtcaccaatagttctaataatacatcattatatcataatgatatttatgatgatctgatcagtaaagccaaagcaacaaacaacatagaatatttccagcaagcacaagatattcttacaaaagatgtcccgtcaattcctatttattactatgttagtgccaaattaataaaaccttatattggcggatattatatcagtccacttggtcttatgtcatcgaaagatctctatgttattaagcattaataagagatgtttgtaagattaaaataaagattacggtttttaaccgtaatctcagaccgctgacaaacctcattgaaaataatggggtctgttcttttcataatgaatcctaatacaacccattttcctcattgacccgattcaatcgcccgtcagggggttagatactgtatttgcattttctgcaacccgcgaaaatgggcgagagcataaaaaactgtggggcatttatgtggcaaggaaaactgcctgttttccgttcagttattgggtgataaataataaatcgctttgcaatttactataatttgctctataaattacagtagtctacattgtgaaatattcagaaattgcgaggtgacaacatggctgaaactattgaccacggcaccctctcacatctagtggaggccggagccgttaaaggagcgcacatcgtaggccagccaggcggctgggccgtgatggtgcgctatggaatgcacgagcgaccactggccgcacagcgcagccgcaatgtgcggctgttccgcaagttcgaaacgctggtttcctaccttaaaaaaattggcattgcccgcttcgacgtggattcatcaaactacgcccccgctccccccaatacctcaacgcgcaggccagatcgtgccgaagcgctcaagcgtacccacgaggctgctgcatatgatgcgtggtttcgtgagcaggtgcagcaagccatagatgaacccggaccgggtatccctcacactgatgtcaaggccaaatttgccgccaaacgtgaagccttgcgtaaacgcattgtacagggtcgcgcatgaaaatcatttggcgaaagatcgcggaagcagatcgagaacgtatctttgattacatcgcacaaaacaaccccagcgccgcgcttgagcttgacgcagactttgatgctaaaatcgaactcgctgcgcagcggcctaaactgtaccgccccggccgtgtgcacggtacccgtgaaatcgtcgtgcggcctaattatgtgattgtctatcgcatcaaggatgaaagcggtacggtagttgtgctgcgcgtgctccatgcggcccagcaatggcccccggccaagtcaagcgagagcgtttctggtgggaaagtctgaggaagagtagcatttgaagaagatgtgacgattaatgctttcgtgaatcaagcgctagaaaatgaagtcagtaaacatcatgtagggccttaatagccccatcggattaatgacaaaagtgctaaccatcgggggccggtctttgatctaatagaggtactggaaaatcgatacctcgatatactaaaagcccccacacgacaacaatatgattgacatcaacagaaccccactttttaaatggggttcgtcagcaatctgagattacggtttttaaccgtaatctttctcagaggctatcaaagtcacgcccactctacgccggacaccacctgcgcaggattagcaagtaatttccgtaaattacgcatttctcttccctgattaatcgcgacagcaccgactaaaacttcattttctgtaccaaataaaatggccttatctgattgcaaatcaccctgaatatgccactcttcagcctgcatgttaccaaccatttggatgttaatgccccattgatcagtccagaaccacggcgcgcctggctgcgggggggccaaccccatcatggcatgcgcggcgatggtcgcctgacggttagcattttcccaagtttcacggcgctgtagatcacctgtcagcggttctctctgaaggcaaacatccccggcagcaaaaatatccggttcagaagtctggcaacggctgtcaatgacgataccgccatcagtcaccaaaccagcatcagcggcaagctgatccctgaattcagcgccgataccataaataataatatctccgatcaccttttcaccggtgttcaatataagcactaattcactcccttgtttttgtgcggaaacaatgttggtatcaaggaagaattgtacccctttttcctgatgacgattcaaaagataatcctgcaataatggaggagcacaacgccccatgatgttatctgcctgttcgataaccgtcacgtttgcccccaattcacaagaggttgccgccagttccaggccaatcacaccaccaccaacaatcaaaatccgtttgtcttttttcaccgcctggcgtaaacgttgcgcatcatccagcgtcctcaaggtataaatattttcacccagctgatcgagcagcggaaatcgtctggctcttgcccccatagtgagcaggagtttgtcatacctgagcttgccgccattttctaaaacaacacaatgtttcgatggcataatctggctaaccaactggcctatgcgcagatctatctgcttttccagataaaaatcttcggagaacaggtatttaggcgcttcctctgggttgattaaatagtcttttgataaaattggccgctcgtaaggcgcatgatattccttaccaattaaaataatatcgccatcaaactgctgctgccttaaggttgcggcagccatagctcccgcttgccctgctccaacgataataaaagtctgattccgcatattatgctcctatctgagtgacaggttgagcactgaccattgccatccctgccagccactccttaataggttggtaataatgccgttgcgctttatattcgccataaacagaaagcgccgcaaaagccgcgatccaacagcgaatttcctgtccacctttcccgccctgaatggcgattccaccctcggttaacgaagcaagacgccgaatatcgccactacaaaaaatacgcaataactcgtcatcccactgtggattcaacggagcaacgatattctcgccacgagccaacgattttccaacctcaattacccggatttgccgtttttgacgcgcttcttttgtcggatttctcccggcaatcaacccttcttcaacttccggcggaacctgtcccatttgtggtatcgggggatcatgtgataagccaccagagcctaacagcaatacccgctgatctgttgtgaataggaattgacccactgcacgacctaactcaacagcacgacggcaggtcggcaatggtttagctgcacagttaataaatattgggatagttggataacgctgtaaattctggcaaagcagcatcaatggctgagtaaagccatgatcgacctgcatacgccaggagtgagccacatcaatccctgaatcatataaggcagaaattaaatccttcgcggtgttttcaggaacattgagtgggcctttaccaatatcccaatcccccactgcattcgctcttactccaacgcaaaatgccggcatgagatcataaaaaaaaccattaaaatggtcgggagcgaaaatcactatcaattgtggatcgtagtcctttatctgttcagccaattgctgaaaaacctgccgaacatgcttttccgtcgcttcaggcggagaaccaaaacccatcaaaggtgtgtgtgaagtacaaatcaatttaacggtcatctgaactctccttcttggtcggagacatcactcccgctgtcgtttggcgaatgccacggatacttaatccggcatcagccgttatcatcacccccgttaaagtgcggttattggcacgggaagccaacatgacatacggaccggtgaaatcttttggctgaggtatgaattgcaaaggtaaaattgcactgagactttctaatgacaggttatctgtaatgcatctatcttgctgagatagtgaagccgccccacgaagatcacttggcatcccacaaggcgcaacaccattaaccctgataactggcgctaattcataagctaactggcggatcatgccgaccgcaccgtgcttgctggcggtatacaacacccctccaccaccagaaaaccatgacgagtttgacaacgtaaaaatcatgctgccttctgatgcggttagcgccggtaacgcggctttagcccctagaatataccctttcaggttaacccccatcagctcatcaaatcctttatcaatctgctctggtgaggcgtcaagcaggctaattttgtgatcccatatcccggcattaccaacaaagcagtctagtttgccaaaacaccgaacagtttcagccactgctcgctcattgtcctcaaaagagacaacatcaccgtgaataacacagatatcgttaccaaaacagtgtgccaaagctgtcgctttttctgccgataactccaaaacgcccactttggcgccttcagcaataaaacgctctattaaagccaaacctaaaccggagccaccgcctgttaataaaatgacttgatctttgatccaactcattattgctcctccgatacagtgatataaatgtttccgtctttaacaacaacaggataggtcttcaatggatctgtagcaggaaggcaaagtgccttcccggttctaagacaaaaactggccgtatgcagtggacactcaactgtcgcattgtcttccaaatacccttcggatatagaggcattaccatgactgcaccggtcatcaacagcaaagaattcgccatcatagtgaaacaacgcaatatccggtgtgtattcaaccttacgcgctcctccgtcgggcaattcttcaacagtacatacgaataattgactcatcagaataagacactcaagttatggaaagttaagactgcctgatccaaggtaatttcacgtttgcaaatcagccagctatccgtttttggattacggcgaacacaatctagccgcttaccaacataaaaaacttcatctcgctctttttgtgaacggtacagcaaataattggactgaacatgaaattggtcaggcaaatccgtttcagtaatcactaagtttgtcagtagatgacgtgtacgggatgggggttcctctgcccatgccataccggtctccaaccgagctatccggcgttcaagctgaaatttattgtcattgaacaaccaagtggttggcggctggatactcttacggcgatcgcgggtttgggcattaacaatggtacgcatggtatagctgagatcttctgataacaactcaagccaatcgcgaaatctccactcatccagtaatgcaatttcgtaatacaagaactggcttatttcatagtgcagttccggcgatactcttttttcctgattaacaattaactctttcatttgaccaactcctgctgataaacccggcttttttcctctatctcatcccaggtttcactggtgagtaagtcagcccaacgctgatacataccacgggcaacggtttcggaaaaaacataattggtcacacccggaattccatcatcccgcactctttcttgtcccaatctcatttccatgcacaaggtgctgttacgggctttgtaacctctaagtaccttctgaatttccacccaattttctgaatcatcctgttcgagaaaacctgccggaccaaatgcacgggtagcactgttttcaaaagcggcttttacttccggagaagcggctttatctgcgatgcagaacgcccaaacttccacctgatcaggtccacgtggatgccacacccgcatggttgcagtaccgttaagccaggaaagtgtcgggaaaatattgttgtgaccggcaagacgcagtgccctgacttttcccaacctctgctctgcctctgcataggtttcacggtagtaacgggcaacggcaccatcaacccaaacgttggcatcgggtttttcggtcaagaaaaatccacaaccgtgaccattctgagcaaattgcacggcatcttttgccgtttcccaaactggtcgtgaagtctgatcagcacctaatgcttttttatcgtcgccatcctttacgctcaaaacctgtacggcggaggcatgactgaataaagcatggtattgatcaccggcaaactgttcagcgggtaatttccaattacaattgatgagccatttttgcacaccaccaatcacttcggtccctccttcgcggcgatcaagcacaccatcaagataccaagccatatcaccgagataatcaatcaaggagggggctgtcgtatcccagttaccgaaaatcaatcctttataattttccacacacggcacttcctgaagtccccattgctctttgcaaagcccatgtggataagcgcacgcttccaacggaacgtcgattaatcgaccgtccacaccatatgaccaaccatgataagggcaagtaaaagcacgggtattaccgctatctgcgtaacaaacccgcatggaacgatggcgacattgatttaggaaagctttaacggaaccatttttctgacggacaacaacaacactgtcctctcccatataagtattgaaaaaatcacccggattgggaatttggctctgatgagctagaaacagccaacaacggccaaatattctttcgagttctaattgatagagctcgggatcgatataaatctgaggagttacacgaccggctcgggcatcaatcaggcggtaaatatctgaatctttgctcaatgtcatattattcagtcctcaagtaaaagaaaagttgactttttgccaacatgcaaaatgaatgctattaatagattaatattttgtgaaatacattgtttgtttaaattaagactttttttcgatatgtgaggaaacagcaatggaattaagacacttacgctattttattgcggtggcagaagaattaaactttactaaggccgcaaaaaaattgcatactgcacagccttcgctaagtcaacaaataaaagatttagaagattatattggttctacactattagagagaaataaacgcagagtctctctaaccaaagccggagaagtttttttacaacaagcccggcttattcttgaaaatgcagagaaagcaaaaaaaatggcccgcagagcggcacaagaacaaattgtgctaactatcggatttgtcccatcagcagaagttaaagtattacctgaagtcatcccaatatttcgcttggctcatcctggagcaaaagtagaacttattagtttatttaatccaggacaagaagagaaattattacaaggtgacattgatgtcgctttcatgcgcccgccaataaagagtgattctattgattttaaagtcattcttaatgaaccgctggtggttctgatgcctgctaatcacaggctaagatattgtgagaaaatttcagtcaacgacctacaaggagaaaattttattactcctgatccaacacaatctggtgtattacaacagattatagaaaattattttactgaacataatgtcgtacctaatattattcaaactgctaataatatgctattaattttaaacatggttagtctaaatttagggtgtgcaatagtacccttctatattaccagcatcatgacagatgccgttatttgccggccattatcaggatattctcccacaatagagttaataatggcatggcgaaaagacaacacatcagaattattattgcacttaatagatgttgttgaaaataaatatctgcaagaataaaaataagcatcatcgtttttttctttcagactagacatattaagtattagtgaatattacccgctgtcgttatattaataacgtattaatttaaaataaataaggaagatatcattatgtcaatatcagcgaatcttcaacataaacttatacagcccgaattacgttcgctttggtctgccattgccagcggtgaaatccatctacatcatctcaatgtaaaagggataaaaactcgtgttcttgaagcgggtaacggacctactctgattttcttgcatggtattgcaggtcatttagaagcttatatgcgcaacatactgccccatgctgcccattttcgtgtactggcaattgatatgctgggacatggcttcacggataaacctgtccgttcctatgagattatcgattatgtggaacacctacgggatcttattgaaacattaaatctgaagaaaattcacctttctggcgagtcgctaggcggatgggttgcagcccggtttgcggcaaaatatccgcaatatattcaccgtctggtgttgaacaccgccggtggcatgattgctgatccaaatgtgatggaacgcctgcgcacactgagcttaaatgcagtgaaaaaccccgatcgggaagctacccgcaaacgtcttgaattcctaatggaagatcctgcaatggtgacagaagacttggttgaaacccgttttgccatttatcgtcagccgggtatgttgtccgcaatggaaaacatcatgtgcctgcaagatatggatacccgtttacgtaaccttttgaccaaagatgaactggcaaagatccaggctgaaaccttagtgctatggaccacacacgatccgactgctgcggtttcagtaggccagcgtcttgccgggcttatcaaaaatagccgttttgtcgtgatggaaaaatgcggtcactggcctcaatatgaagacccggacacatttaaccggctccatatcgattttttactcaacggcaacaaataatgtccctttcagacgagtgatattccaattggaatgtcacttctatggtttgagcaggagcaacaacagatgaataacgtcataacccatcttggtaaaaaattgtttcaatcatggcagagtcatcaagccatcgatcctatctctgatgaatatccagaattaacgttacacgacgcctatctcatccagcaaaaagttattgcttaccggttggaaacaactggagagcgaattgtcggtaaaaaaatcgggatcactagccaagcagttatggatatattggacgtcgatcaacccgattttggcattctcacctcagatatgcattacaaaaacaatgccactgtacccattgagcaattaattgcaccgaaagctgaaggtgaaattggttttatcctgaaacacaatctgtgtggacccggtattacagcaggagatgtactcagagcaacagattatgtcgtgccctgtatcgaaattgtcgattcccgtatccgtgactggaaaataaaaatcacagatactgttgctgataatgcttcatcagggttatttgtcattggcaatggcacccgtctgccctcagaaattgatttagctgccgtgacaataacgctagagaaaaacggtaaactggttgacactggcattggtgccgctgcactagggcatccagccaacgcggttgcctggctagcgaatatgctaggaacactgaatatggcgttactccgtggagaaatcattctctctggctccctcaccaccatggtgccagttaatacgggtgatcagttgaaaattaacttactcggtgtgggatctgccaaggtcagttttgcttgaaaaattagccttagtttattaataggagtcataaaaagcccccaccaaagttactggcaataaagttattagtaacttagttattagcaggggcgtaaatggcttattatcatttcaagcctaatagaatgtattcctttcgttaatattatttttaccaaattaaaaacaataatttcataagtttcgtggtaatacacatctgtcattccgcagctatatctgtaatatactgatttaaaatcgtttgtataaaatttatgcatttgttaattcttaattaaaacaacaaattatgaatgcggtgcggaatgtcggacacattcgtcgttttcagcgacaacattcatcatgtcttgagtcgtattttaagttctgtattgctgaaaccgatacggcattcaatcaattccgcaagagcaagggcgtttttttctttttttcggttacatacgatctgtaatgaaaatggtaacccctgactgtttaatcctgttgggatggagaccgcgcataagtcagcaaagtttacgaaacgggtgaagtcatttgggggttgatgttcatctttttcagctataggccaagaaggttctggggttgtaggaattactaaagcatccacattctgaaaccaattcgaaaatatcttccgtacgtgacgacagaatatcaatgcttccgaatactctttctcttttatctctttgccacgttctaatcttactttaattgtatcgctgagggagttctgtgaattacacaaatatccataattctgccaagcctcaaacgcagtaatgatagaattagccttcatgcactgcgataaaggatatgggaaaggtttcttttgagttaccatacccatttgagaaaaaacttccagcaatgacacataatgcaaacctgtttccttatctaaaatatattcttctgacggtaatatgccaatattcagattattaatgcatgaatgatacgctaaatttgggttcagctgattataaacaatgaatatatcagatgcatgcttggcaataattcccacagtatccatcgtctggcttaatggaagcatacctgatgatgacaaattgcccattgatggccgaaacccacttacgccacaccaagcggcaggtatacgtgcagatccccccgtgtcagttacaagagcaatcggtgtcaaaccggctgccactgctacagctgagccattgcttgagccgcctggagcaactctctgtgattgtccccaagggttgagtggcgtcgggctattttccatgatgcccgttgctcccataccgagctctactgctctgtgttttcctgtcagaatcattccctgtttcaagagggtggctaccactggtgccgtaacatatgctttttgactaaaacagttcgtgcctcctcctgtgaccttacctttcagatcaaaaaaatccttaacagcaaaaggaataccatggagaggaccacgccaatttcctgatcgtatttcctgttcggcatgttttgctgcggcccgcgcatcagcttcatagatctctgaaaaggcgttcagcttatggtcgtaacataaaatacgcttcatgtactcacctaaaatctcaacaggtgatatcactccgctccgtattctttctcctaattcattaattgaaagactgataatttcatccatcatttatctgcctttagtgttatagaattgtgatattcatcaatatcattttttacaaaaagaaaattgataatcaagatggacagtgtggctatgataatagtaataaccgcatacttcatgtttaaaacaaagagtttttcactgtttaccatttgcccaaaaactgccacggcaaaagcggaacctatctgaccagttgcacgggaaactcctgaggcaacgccagtgtactgtttcggagtactttgcataaataaagatgttgacattggtgatcccagccctccaccaaaaccaatcaacacaagtggaacaaaaagataagcatagtcattgttgaactgtgtaaccagtaatccactgaaaccgactaatcttatcatggccccaacaatcatcatgtggctcgtctggtaacggcgtgcaagccatccagagaccttatttcccaatatgacactgattgagagcggtaacagggccatacccgtttgcgttgcactcaggtgctgaatatcctgaaaccaaaaggtcagaataaacatggcaccaaaaaaggaaaaagcgccagaaaagaaaatccatgaaatagcgctaaaatttggccgcctgaacagctccagtggaagcataggagctttacttcttctttctaccactatgaatgcagtcatgatgattaaagacaagcacaacaagataactgagttcaaattgatttgaggagagtcattcagccggatgacaccagcaataaatagaaatattgtcaggaaaagaagtagctggccttttatatccatagttaaacttttatgttcatgctctggagactgcaccctaagtgtcaaaaagatccctgctaagcagagcggcacatttactaggaaaatcgatctccacgacagatattcggtcagccaccctcctatgacaggccccgccaccagagcgatacctccccagctcgcccagctggcaatggcacgggttcgttctgttttatctgtgtaggtatgagtgatcaaagcaagtgaacctggtacgagtatggcggcggaaataccctgaagcacgcgaccggttaataaaatagcggcttcactgctaattccacacaaagcggaggagagagtgaataatccaagccctgtaatgtaaacactttttgaaccaaaacgatcacaaagagctccccctgatagtaacaaacttgcaaataaaaccagataggcatttacaacccattgtaacgttgttacaccaagtgaaaggctctctttaatagtcggtaaagctacattaactatggacgaatccagaatgacgagtatgtaacttatattagctgcgagcagaacattacgcttgttacgcttcatgttgtccataagcattccccgattaattacattccactaggagtattgatattcagcgcaatatcggtacggtaatgcatcccttcaaaatggacttgcttgaccgtttcatacaacttttctctagcctcgttgaacgtcagggctattgaacttaatgcaataactcttcctccatgacttattagttttccatcatcagatacaacggaggaatgaaagatatgagtatcttctgaaggtaacggcaagatgagctcatcaccttttcgctcggtaaaaggataaccttcagacgatatttgtaaggcaacagaaacaagcttactccagcgtacatttgctttgcccagctgtttttgtagggtcaatatgaataattcatgaaggggactctcaagtcgttcaaggatcgtgaagacctctggattacccagccgacagttgatttcaagaaggctcggcattccttttttgtcaatcatgacaccaaaatagaggaatcctatatattcgattccttcagaattaagagctgccagacaaggttctacaatttgggtaatgatagcctcatgctgtgcggaggacagtactggggaataagctcccataccaccagtgttagggcctttatccccatcaagcagctttttataatctcggctttcagccagtggtagatagttttttccgtcaaagaggatggtgtaagagacttcttcaccttcaatgaattcttcaaccagcattggtccgacatttcttgtgaaaaactcttccagcgtgtttttaacatgctggcgatcctgggctatcactacacccgttcccccatgaaccataccgtctgctttgataaccacaggtaaaggtaatgtgtcggcaaatttttgggcctgttcctgtgattcacaaattgcgctgtaaggtgtaggtatttgatattttttcatgaattttttggaaaagcctttcgaccattcaagtcgggaggcttcacgagtcggggcaatgattggtaacccacgagatttaaagtagtcggctaccccagctgccaaagtttgggtcggtgtgataagcgtaaagtctgcttttagttccagagcagccctagccagcccctcaacatctcctgaagacactggaatattttccattccgggtgcgcatgacgtagccggattacctggggctaaccatactttttctactgctgggtcctgtaataatttccatgccagcgcctgtgcgccggcacctgaacctgctataaggattttcattatagtcttctctcaaaacacagggttaaaaggaatttcatcagttttgccacctgactaaatcatcgatccagtcggcaaaatgttcaattcgttcagtaagttgtacatcactattgccggtaattatggcgctaacaacgtcatcggtataagttgttgcctgttgataaatttgcccgactctccctgataagcagagtgtggatatccaatcataaggaactgaatctggcaaagaaatcagatatgccggacgaacaggaacgcgaattgatgctgcgaattctcttggttcagtccggactttcagtacatcattgatacctgcacaactctgtatccaagctttatgtatatttatcccccaagtgtgttctattaactcccccgtaagtgaacccgcagtacgggccgcaatctcgcataaaattaatcggtcatcggcggtgtggaatatttcggcatgaaacccgagggtaggcgcagcaggcaacgctgatatagttcgataggtaatactgttcagtcgctctgccaagggggtagcaggatcaatagtacggctaccaaatatacctgcatgctggtaatcaagagcattattgatataagcgcagggagcaaaaaatgaatctcctgcttcattaattacaccgttaacatgatacatatttccagagataaacttttctaccatccagccatcaacggttctgtcgcggaaaaaatcggatacttctctgagactcctacataccttaacgtatttcgagctgcatccatccaccggttttatcacaactgggaaattatgctcttcactgaaagttagaacatccagccaactgccaagtcgtctaaacggagccacttcaatgcctgcacgttgaagataatctttcattaaaaccttatctcgatacgccaaggcactttcaacgttctggcctgggaggccataatattcccgaagttgtgcagctcggataaggtcaaattccgaatgaggcagaatctggctgaatgaggtgtgacgtcctaattctgtggcgatagataaaacaccttcaccgtcatcaaggctgtcgatctgccggacgtaccggtaacggtgctgaagaggaaattgtggtgcagaactgataagccacaggtcatcacggcattcctccaaccattctgcaaagttaatcttgatgcttcttccgaggcatagtattgccatgctttacctcacataacgtcagaaatgggtttgataatatccaatacagtgaaatcgccccatcgagtaccgttatcaacaagatgattgaccgtcatgtcctgccgagcacaacgcctcataatgcgtaaaaaagcatgccattcatcgcttccatgggaaacagggacaggggtatccgcttcaatataaagtgggagcaaatgagcagataaaatttcgttcggtgaacatcttgtcagaatggctgcggtatatcgtgcataatcaggcaactgaaaaccggttttcgaccattcatttattgagcatgagagagattgatcgaaaatgaggtttcccagtccaaaacatgtcagcatgtttttgtgccattcaacacctcgcaaggaatgatgatgatgacctatcactaggttcacaccacattgtgataatcgttttgatatttccttttcgtatcttgtaataatgtctttacgagtatgatcgccccagtgcatcgctgcaataataaaatcagcttggctacggatattgccaactaagcatgaaaaatgtgcccaatcatcttcattgatgacagtcataatatcgggtaacgctccgggaaccacagctccggaaaaaggaggactgtaataatctcttgaacgtaacgctgcaacgcctccctgaaaactaccggcttcagttccgacataataaatgcccgttacgccgaaaacagcaaccctgatccctctacattcaattaaagcaggttcccaagcttgctgaaatgtcagaccggccccggtggtttgcactcctgcagaatgtaatgctttcaaggtgtcagtcagaccctgcaatccagaatccatggcatgattattcgcaagggaaagcacatcgaacaatgccacgcctttggcgttttttactgatgatatcgtcaatccctcgccgtccgggaattggctcaggtttgtcagtcagtacaccttcatagttaccgataacgatatcggcattctcaactaaagacgtcatgtgactgaaagcagaagcgggatcttcacgattaatgagcacatccccaaatgaagcaatagtaatactcgacataaatttctatccttctgactaacgctggtcgttgctcaaagccttttctgcataaaaatacgggcatttccatccggtaaagaggacacctcaccaaaaatgctgtaaccatgcttcagataaaagtcaggtgcctgaatcgccatggtaaacagcaccgccatatgacatccacgtagagttgcttttttttcggcccgtttcagcaatgtacttcccagtccctgccgacgcagttcttccggaagaaagaaataactaatgaaaagcacacccagagaggtacgacccaccaagccaccaacgacttcaccttgctggtcatagacatagaaatccagcggctggttgtcagaaatattggtttgttccacattccatatatcaagtaactgactaatttttccccggctttcaacatcaccctgatcggaacttttgatggagtgcccggagtccagaatatctcgattcatgcattgatcctgattgaccgggccgatatatcgtcccggttggttatattaagttgccgtactcgccaaacgcgtttccagaaataactgctcataatcacgaccgcgagctgttagtgcgggcaccacaggtctgccatcggataattcgatccagagccttaataaatggcgctggttgagtgcatcatcctgaaactccgtgcgggaatgcagtgtggtatagttgttgagaaaaaggatttcgccaggctcaagcataaattcgagtctgaactctgggcggctacatatttcataaaatgcgtggagtccagcatcaagtgcgtcagggagagctagtccctgaagttttgctgctgctcgcatataagcaccgagacacatagagctcaccctgcctgacatttttgagaaaatcggaattttgtatgacgtgtagggaagtttactcgaagagcgttcagctgtagcgtaatgatatccttcaaaaagggcgtcaagtagttctggtttttcccttaacatttgattgtagatagctaggccacttacgatttgagtcaatccccctgaagcagcctccctcaaacacataagcccaacaatttcaaaggcatccgaatgaaatccaagctcccgattagacatatagcctcgattattcggattatttttctcattccttacatgacctatcctgtgaccctgtgagttttgtacgactggacgtccaagacctgttccaattccccagaatagatgactcaggattgagtcagtaaacatttctcgcggaatacctgacactaccacaaccccgcgtccttcagtcaaacgctgatgaatgcgctcctgtaagatagttatttcctcaaagctaaaatctgaagcattgaacgcttcactgggtctatcttccatagcggataggtgatgcctgaatgcttcgatttgttcatctgaaacaggcaatagcacgtctttcttgctttccaactgcgctgagcaccatactgccggatcgtcatcaataatctgatatgattcgttcatgttggtgtcctcaatatgcacaaagttcacaatctggatgttgcggtttatcctcaacattcgtttgtagagttgtgaatgagatagttaccagtttccctgctgaaatcattggccatccaacaagtttcctgatgatatccgcagacatcatccctccgacaatcattgccgaataactgaaagccgaagtcgcagggattaaatcatgttcttctcgccaggcgcgcatggagtaatggtcaggatcctgagtccgtgaccacttttcgtcgcagcggaaacaaccgctctggtcagggaattttgtccagaacatacccattccggcagaaacgctgttgaaaacacccggaattcccatgtcaaaacaggcgtcactgatccagcggtcagcagcgataaccggtcggtcaattgcagctacgacgatatcgggtttgaattgagaaattaattccttaacaacatctgaaccggttatacgcttgaatactgtatttaccgtgacgtccggattgatcttattaagacgagattttaacccttcgactttccgcatccctatgtcatcaacgatataaagctgcctgttgaggttactaagttcaatatcatcgaaatcaacgacagtgatggtaccgcagccagtcattgccagcgccgttgccgtgcagcttccaagcccaccacatcctaacagtagcacatgccctttgaaaagtttctgctgatactcagcgggtgaaatgccattgtcacttaacgcagcaaatccattgagatttcgggaataacgctctctttgatcggcaccgagagcctgataatcgaaatatttctcatcctgaacgaggttgtgagattgaagttcctcgatcaattgtgttaacgccgactcttcaacgtcatgaccgttttgcttcaatactttaagaagaccactgctgttcaattttccttgcatgtggttaagcgcaactattttccagccatcgggatctggaattattttgcttgcttcaccctgacgggtaccggaatgtattgcaatggcattattgctaatcggaacagcaacaaccgttggctgaagccgtggattgttaagtgaaatggaattcgccatagttatgcctctttaatttttactaccggcaaaagaattccccggcaccctacattcatgaccggatcaaaactggcacgtgcctgaaaacctgcaaaccggccaccatatacataggtatccacacctgaccacattgaatctgtaacgccaatatcaggatgaactacggaaatcacacgcccgcgaatgtatcgttgaatgacccatgtttcgtcgctttgcgctgcaagatgtaaggccgtttcccattcctgagcggtggtaaacggaccgaccaacagaccttctcctcttgttgcattagaaggtttgagcacaagagtccctcgttcttgaattgcccaatcaactagatcgatttgccttccctgaggggatgtcgtttggcatgcgcggaggatgcgtgtccagggaatatgtttaagacaaaaagccttttcctcttcaggcaggaaaaagagcatttgcggatcacttaggacagccattatagctttatctgcgagcggccattggcagatgagaggattgatgaaagtgacttctccatgagatgttgcagtaaggtattcttcaacttcaggttcatcgatcaaatcgcgcaaatcgagtttgttatagaccacatcaataacacgaccctgcggatctattaccttgttgttatgtcgacgtaatagagacgcatcaatttcctcggtaggaacccccagacgattgaaaccatttaccatccaggttacctcatttttgaaccggcctttataagtgacaatggctgctcttctggctggctctccggtacgttcgcgatgagtttccagtaatgtctcaagaaataaatccggattttggacaaagggctgaaaatcggcactggcttcaataccgttcagtaaagggtttgacacctctgaccataatgcacctgcaatcccattttggatcactcccccggggcaatcggtattagtttccaagatctgataagttccatcttcactgaaaagaccatccaggcggaaaattctggtcaaaggggtatgatttggcaaattaaataaataatgttcgcttttcttataagtcggaaaatattcacgtatcgagacattttccacccatgcatgagcaaatttttcaaatacttctgtaaaacgctcaccgatgctggcgagttgccgaattaggttatcagacaaaagaagaggacgaattgaaaccggatagttttttccctcaaaatttagtcctccatcaatgagtttttggcttaggcttttctgcgcttctaataaagaggatttttcattttcgtcaagactaagtaattttttttcaatcaagatttcgtcttgataaaacagagtgtcatgaggtgttaatgatgaagtatttattttattctccatacctaactgaacggaaacttgttttagagatttttcaagtaataataatccatgctcaaggacattgatttcgatagtcaacgggggaagtaatttgatgacctgtcccagcggaccacatgtttctataatgagtcctaactcagtggcttggtttctgacattttctgctgcctgcgaagaaaagagttctaagccccataacattccttttccccggattgttctgatcaattgggggtatcgttgatgcagacccagcagatatttatgcacaatttccgatttgtctttaagacttcgcaagaaatgtggatcatgccagtaatcaagagcatatgtggcaccaataaatgcaaggttattaccacggaaagttccgttatgttctccaggttgccatatatccagttccggtttcattagaacaagagacatagggagtccatatcctgaaatagactttgcaaggcagatgatatccggttttatcccagcatcttcgaagctgaagaaagttcctgtacgaccacaaccagcctgaatatcatcaacaataagcagtatattgtttgcagctgcgatttctgctacaccccgtaaccattctacgcttgccacattgacgcccccctctgcttgaatagtttcaagaataattgctgcaggcaagtcaataccggagcccggagaaactagcattttctccaaaacgtccagtgacgtgtcattctgactaaggaaattttcgaaaggaaggcgtactatattgtttagggaaacacctgcagcatttcgttttttctctctggctgtggctgcaagggcacccagagacattccgtgaaacgcattggtaaacgcaacaatatcgctgcaccctgtaactttgcgtgcgattttcattgcagcttcaactgcattggttcctgtcggcccggtaaactgaaaacgatactgcaagccccgtggtttcagtatctgctgattaaagctttcaatgaatgcccgttttgcattggtatataaatccagagaatgagttatgccatctttttcaatatattcaataagatgagattttaatcgagggttgttgtggccgtaatttaatgatccagctcctgataaaaaatcaatccatgatttaccctgcttgtcagtcactaaggcattgcttgccgtagtaaatatggccggatagttacggcagtagctacgcacatttgattcgtacttttcaaaagtcctgcacgcgtcttcagtgaaaagtatctcattttttatattttcatacacagcatcaaacattctacagcgcagcaatatcgtatttttaccaaccgcctttactcgcttcgataactgttcgttattttctataatattgtgaagaatatgcatcatggtaatggcatgatcttcgtcctcttcaatatgtaatttgaaaaattctaatccccgttcagcaacacctaagtgcgtaagagcatgtaatacgggcttgtagatcattggaacaattgcttcggcccccaagcaaagtgcagctaaaccatcagcaatttctcctgagcggcaataattcaggacacacgaagcaagatgagaggtttcttcaagtgcaggaatagaactgacctgtgcacctgtttccatcaatgagcgctgaaacaactcagcgtgagtgacttttccctctccatttacccccatctcttcacgtaaattttccatcagatgatgaatatcattgaagttatcaatatggctgatcagagcacacaaaaagcgagtaaagttacgtgaataataatgatgttgaatcaagaaataacgcattccggacagagtgattcgttcttcactcattgcgatgagtaacgggtggttaaccagttttttcaccgcatctatatccagccagttatcccagagtccttcttcggtcagtaatcctatatcttttttatcgggtaaagttacagtctgattttgttcactcaccttgcctctcctgtttctgaaataaaacgcatctctgatctctataacaagcagttctttactagtagcaacagaataagtactgcggtgcttataacctcttaacaatcaatgccagcgaaaatatacccgttatctttcaagttgcctctttgttggctgcactcactcaccccggtcacatagttacctatgctcccggggattcgttcctttgccgtcgcgatgcatcttgaaatccatagggtataaacatttcattgatgaaaccataaattatcttaacaatcatttcaataaattattaatcacgcaaagtaataaatattcaactatttgaaaaataaaattaatatctttatgggagtatgagtaagtaccaatatcgcctaatttcttattaaaataattactaattaaaataatttccaataggtatcaattgatgtatctaaatagatatatggacaccgactcgattcaagtagataaataaattttctggcaacgaagtcgaaaacatatattcggcttcaatgagcccggatgaaaatcggtactctctgccctcattatttcaattgatgctatacccgttatctttcaagctgcctctttgttggctgcactcgctcaccccatcttagtgaaaaattgtttcaatcatggcagagtcatcaagccatcgatcctatctctgatgaatatccagaattaacgttacacgacgcctatctcatccagcaaaaagttattgcttaccggttggaaacaactggagagcgaattgtcggtaaaaaaatcggtatcactagccaagcagttatggatatattggacgtcgatcaacccgattttggcattctcacctcagatatgcattacaaaaacaatgccactgtacccattgaacaattaattgcgccgaaagctgaaggtgaaattggttttatcctgaaacacaatctgttatgacaaattgacagattattaccggaggaataaagaataatgatcaacgaagcaattcaggcagcaaatggcttggtaagcattgtccctctcttagggggcagcacttcacgcaaagattatgatgaggctataaagctggtagaatatctggtcgagcaccatccagatagtccgctggtcgatatgcttacagctaaaattgacacatacgaaagtaatgcgccagagttcaatgaacgtattgctagcacacaaagcggtgtcgcaattctacgtacattgatggatcagtacggcctgaatcagactgattttgaggatgaaatagggaagcgttcccttgttagtcgtattttgaaaggtgaacgttcgttaacgcttgaagctatgcgtaaactctcagttcgttttggtataccggttagtgtttttattgattaattgatagcaaaacgacacaaccgacaactgcggccattaaaaaatgctggcattacccgtgtagttgcgggtttttaaatcatcattcatgcaatttcccctttcttcccttttattgtctgacaggccagttgcagcaattcggcctgtaggctccaaatttcttcctgcgaatctttcagcgccgatcgaacctcttccagttgcacggtcagatgctcaccggtagtgctgcggcggaccacctcctcgcgcagcaccttctcactgtcatttaaagtgagcctgaggcccttttcattggctcttaatgcgagcaaaaaaggtcgatgattgcaagcaagcggctaccgctaactttccagcaacttctgcggtattaactaatacagccatattggctttcgcagaaattccatcggtttctcgatccaccattctcatcaaatactttgtcaacgagttgccaacaatatttttcttcttagcctctaatacagcttcctgtataattatatcaatcttttgattatccagagcatcctcaggcttagttggcgtcgtaattaataccccttttcctcctggcagcatccaatttatctcaatagctttggcaatgacggcaagttcatcaaggcgctgtgggcttttgaatccgctggaacggcaatagaatgcaggaaaatcatccgactgataggagatgactggcacattccatgtctccaaaaactccaatgttaatccaatatcgaggatattttttgcaccagcacatacgacagcaactcgggaacgcgttaactgagtcaagtctgccgatatatccatactcgtctctgcccctcgatgtaccccaccaatacccgcagaacagaagaatttaatacccgctatttctgctgcaagtattgacgatgccacagtggtcgcccccataccgccactcgctaacacgaccggaatatctcgactcgtgacctttggaacgtgagatgctgtcgcaaatttttcaatttgctcatctgacattccaatcaaaaattcccccttatctattcctatcgttgcgggtattgccccactttcacgaacagcctgctcaacattcttagctgttgtgacattatcaggataatccaaaccatgagtaatcacattagattccagagcaacaacaggctttcctgattcaagtgcttcttttacctcaaggctgaatttaaatggaaccttattgctgatattcatactatataccttttaatttttttgatattatcgactaaatactgaaccttgcagattatatttctatatcgctggtaattttaaaattagattattttctcaatctcagcaacaccttcactttccaacagttgatagtgatccgatattaattcaattattttaggcgacattgatgaaatcacatccgattcctcgataaatgaatcattatctctattcgccttgaaaatagttataggtgcctttaggtgtctgtgataaagctcatcaatactgtacttgaaatcataagtcaaagtcacaatcctaacgatacgttttactaatgatggttccaagtttttaaaacgactacatataaagttaataaatgtcgtttcactatttacttgttctaagcaagttttaaccattgggctgttgattgaacgagaaaatacagaaaaaagtattttaacaaaagccggattagtaaattcagcgcctttatccatatattccgcttgcttcatatcaagatgaggagatcccggagccaataaattcaatgcgttaacttcttctcccgcttgttcaagctggtatgcaacttcaaatgctactcgggcaccaaatgaatatccccacaatatatatggcccttctggctgtattttctttatctctttaatatcctcttctgccattctctggatagaagaaaacggtatttcactctcgtttatcccatatgcctgtattccataaaatgcccgatcaggaacgactttattagcaagcaatctcaaactcataggatatccgcccaaacccggccaacagtaaatggggtctttgcttgcctgattcaataaaattaatcttgatattgttttagagtctgtctgttcaatccacttagccaattctgctatattaggagattgaaaaagtatctgtaacggaaaacgaatattaaaggccgcattgatcttattaaccattgcaacggccatcaaagaattacccccactttcgaaaaaatcatcgagggcagatactgaatcccatttcagtacttccatccaaatttttccaagccttatttcagtatctgtatgtaatggcaccaatagacgctgtgttgaaacattctccacggctttagattctgataaagattgataatccacttttccattggccgtcaaaggtaatttatcgaaaactaataccttatttggaatcatatattgagggagttgttgttgaagatcatctttaatgatttcaactggccctttcatatgaacaacatcttctttcatgccttcacacatatattgcgcttggctaatacccccacctatgcagaaataaaatgccgccataggtctatcaagtgcattgagaatagatcgcatccttttcgccgaaggtaaatcgttattgctcttcgaactgtaaccagatgacattaatccaatatacaatggattactttgtaacgcatgtaaccgacgacccagtgttatataataatgccattcagggacacagcgtggaataattgacacgccaaaactggagcgatcataaacttgctgattaatcgcaataacatccttttttcggacaatatcatcacttattcgtacaaattccccgttagaaaagtgatataaaccacacggcatctcaggtattttatgggcatgtgtttgtaaataaatatcagtctcaaatggcggcaatccatgttcatagctacatatttcaaatgcaccaagataataatcctgaatatcaccatcataccaatctggacattcatcttgatattcacttttaccaatactcaagccaatttccggtaatacgtcatcaaaaagacccatcatatggcccgcttccatttccagaacttcttgtatattgttcttataaacgggctcaatggcttcatgcttgccaataaaatgcacttttatcgttggcatttgccgacgactcaatgttgaaatttttattaacttatgtgtcactggatgataatagtaaatccccgcatccaaaccgagaacattatgcaattcaaaatacatttgtgtcgcatagagagcacccggtgaagcataggcatatttgggcaataaacgttgatggctggtaaactgaccaaaataacgcaatgcataaccgaaatcattcagggttagatgactcagtggcaaagagctaatttcattcgattgagtggctgtcagcaatttttttaatttctctaccgttatttctgttccctcaaaatagcgatatgtcttgcgtccaaatgcatattctctctgttttatctccccttcttgataaggaagtaagaatgtagggcgattttcacataactcttcacttcgacaaccagaattagaaagttgggctttcacctgtagtttatcggcttttgatttgtgatgtgagctactattaccttgatccatcaatgcagcttctttctcatctaattccacacacgcgatgagattttggaaacccgttctggcatccttcttaattaacattgccgccgtctttatccagctatgttcttcaatcgcatggcgtatttcatcaagctcaatacggtaacctcgtaatttgacctggctatcaacccgaccaacaaaataagtattaccatcagcccctctggttaccagatctcccgttcgatataaccattgatgttgagttcctgatacaaggtgattacaaataaatttatcttttgtcatttctggtttatgcaaataaccacgtgctaattgagcacccgaaatataaagctcgccaatttcgccaaccgccacaggtaatctatcatcatcaagaacgtagtattcggtattatctacaggtgcaccaatcgaaatagaggtttgataattcggcaaagtctcatttgtcacccggaaaaatgatgaattaatcgtacattctgtcgggccatataaattgattaattcacagtgagtaaaactattcaaaaattgcgtggctaatttggttgtcagcgcttctcccccactgaatacttgagtcaatgataagcaatccaaaaaattaggattatccagtaacgcttgtagcaaagtaggaacacattgcaaagtcgttacttgatgctgaagaatggttttaataattgcatccggatcgcgatagcaacctaaaggacccataatcacttgaccaccaattgcaggcgctagaatttcccattgagccgcatcaaaactcattggtgttttctgtaaaatccgggaatgacatcctaatttgaacgcttttgcaagaaatctcatttgatttacaatactgtgatgttcaatcatcactccctttggcttacccgtgctaccagaggtataaataatataagccagactagtgggtttaggaacttgaactgtgcccagaatatcttctattgttcgtgtttttatcgtcagagcgacatcttctggtgtcataattaatactgattttggtgcaatgtcctgtagctgtgcttttaagtgcgattgcgtaaaaatcacatcaataccagaatcttctatcatatatttgaggcgttcagttggatagtcaggcgataacggcaaataagctttatccgctgacaaaataccccatgcaccacaaattaaatctatagaaggatcacaaaaaagcccaatacccaccgaattctttgagctaatttctgacagacaataccctatctctttcaccctcaaatagaaatcagcgtaactgagagattcttcttgatcaataacaacatatccatctgcctggtgcttaagttgactctcaagcatatccatcaatgttattgcttcttctttaagataaacatcattgattgagtcacattgtgtaatattattttctaacattttcgataactttatataataataaaatgaatatctccgtagttaaaaatgacattttatctacggaattataagtgcctttttgctcatgatttatgacttatattttattaaaatcatgcaatcagttaaattcaacaaagacatacctttcgaggcagattaatacccttaccaattacattattcaatgctctccgaaaataaaacggttattattctccacggtaatactggagtatttttttgtagtttcgtgataaaattcatctcatcacgatatggaattatcaatcaattaattcattattctttaaatattccaatattattcaattggtgcttcttcgaaagaaggaggaagcaaaggagtacttgtaaattgactggatgctgccctataaatagttaaaccctgttctttccacaattgattcatcacataaaccagtttcggattatgttcttcctcttcctctaatgccctggcaataatatgcgaccactcctgttcccagacaggataagtcatttcgtcttgcctgaatgaataagtctgattaagcgccgaaaatttggcaggcttcgataaatcagttgttgaaaacagaatgcacaacatgccaacccagtaacatttaataatatttttactttcctcagccggtaaacgtgaagcgatatttttcattgcaaacaacgaggtaatcaaatgaagaaacaaaaaatcaccgggtttagcgagataaattaatgtcacgacataaaataactgcgcccaactttcttctacattttgcgtctcaatccaaaccggcaaacggtatatttctgggtgaccttgcattaaaatacgtgcaatacgatattgaagaccagatctttttaattcaggatgtattaaatcagtatcggccaaatcttcattatcaatcaacgaattcacccaatcggtcaattctgctctcctctgctcccacagtgttgaaattcgcaatatagaatcaaaagcattcttatcgtttagcgaactatcaataaaagcgcgttctgaatggcaaggaacgtacgagaatgccatgtaagcaagtccttcaataatcatccacggatgattaatatccaatgcccaacctaaatgaatggtaccgtgagttaatgcaccagcccacccagacaaaagcgttggcatatattcttgtaatacttgttcaatccctttctgtttaatttcttcttcaaaataatcacagtaagaagaataacttgttcgcttacccaagaaatgtttccagttcgaactatctaccacgtgctttaatgttttagggggttccagccccataccataaggcgtcaatttaacataattatcataatagtctttaattctgctagcactgatccctaaaccatgcagtgctataacagcatgtttaatgtgattcgtcaggtgaccgttaaattcaatgtgatatgagcgatcattaagtagtttattaatcatttttttaccctacccttattttaactcagttgtttttctagtgagataaattccaattaacacaaacagtactccaacaatttttaccaacccgggcgtcatcccctgatatagccaatcaagtagtaccgctgataacatttgcccggcaataacaaggacagcggcattcatcgcccctaatttaggaaaaatatagctactgactgctacaaacaaagcgccaaacaccccacccatataagccgcggttgggataacgctaaaatcccatttattccattgccagctcgataaaagtgttaatatcactgttaagagaaaaaaaccacctatatgattccaaagcgaagcaccaaaagaacctatcgagacacttaactgcccattaatcgtccttgtcgccgcgataaatatgccatttaaaaaggcaataaaaatcaagctcagcattagttacttcccccaaatagaattaatatactgccaaatagaacaaagaaaatcacataaaaatcttgtatcactatctttctttttcttgttcctaaaaacccaaagcgatcagcaaccaaaccaaaaagtatttgtccaactaaccctaatgaaattgtactggataatggtagtccaccattaatagcaatagccgccagcacaacggtaaatgcaccaggaataccaccaagataaaaccatataggaatatttgatttcttatgtttactttcatctatttctttcctagaaaagagcttagatacaataataaacaatatcaaagcaacaatcgcgccaatgccatgagccacccatgatgcaaaaaagggtgttgtactttctgacagcatactattggtgtaaatcatcaacgtcagtagacttccaccaataactgccagtaagatatttcttatcgtattaatcatttaagtatattttcctcaataatacgaagtacgtcatcaaaacaattagctatccaagttggcttggcttctttcaacatatcgacattatgtataccatatgtcaccgctattgatcgcagaccaacggcatttgccatatgaatatcgtgagttgtatcacctaccataactgccatctctggtgtagcaccgtaatattccaaaattttccttcctgattctggatcaggtttaggttttgaaacgtgatcagcaccaattacctcatcaaatacaacgtctataccagcagcctgaagtaatgctgttgcacttgcggtaaatttgctggtcgctacagataatttcactccctttttatttaaagagattaatccatcttcaacaccaggaaataataattcctttgctttcggcagaatacatcgacgatactgtaattgatattgttcaacagctttagcgattaacgcctcttcaggcgatatattcaagagcgttgcaaatgctttctctaagggcagaccaattgtagtacagatgttttcatttcctaccaatggaatgtttaatcccttaaaaacagcattgaatgtttccactattgcgcgagaagtatcaaacaatgtaccatctaaatcgaaaatgattattttattcattaaaaaaatacctttaaaaaatcattaattataaaataatttaataacctggagacttaatcaacaaatcttctttaaatttaatttcaggaaaataaacctcttcattccatttagccttttcgatcggctctaatgaaatggaaataacatcctctttacaaccaaacgctttttttaccaccttcgtcaattctaaagataagatatctttatcttcttgtaagaggttagcaggaaaatgttttatattaatatgtggcatatgtcatccttttatacccgtcatctttcaagttgccatagggtatagatctaaaaaataattaatctatttttattatatcgcattcacgatggtttatacgttccaaaatatcgatcaccaaaatcacctatgccaggattcataaaagcatctttattaagcccattctctattgaagaggtaatcagtttaattgtcgggtatgatgtcatgattctattaagaccaacaggagaagaaagaaaattaacaacaataatattatcttcaggtacttctctttcttttaataaatcgatagccttagctaatgatcctcctgtagccaacataggttcaaaaagtaaaatagttctctccgcaatatcatcaggtaagttcgaataataataatgaggaagttttgttaatttatccctttgaataagaatttttcccattggggaatcaggatacattcttcgatactcgccctctatactttctcccgcacgtattaccgaaacaccacaaagcttagtatttaaaatcgctccattataaatatccccaattggggtttgaatattatgagaggtataaggtagcaactcagatgctgcctctaataataaacgaatgatacgatcagaataaaatacaaactccgattgttcggctttacgattacgcgcttttgtatgcaaagaagtcaaatattgacttttcggcaaaacatgcacgtttttataattctccattataactccaactcatatttatagataaatgttattcagccgtacttggtctcaaataaacccgtgataattaacgtgcctatttagatcatcacatatcgattaaaagataaactctcatatccattctcttaatgcaataggccgaagctacagaatattttatatactactgctttattgtttaaatagttgtatttagcaacaaaatcaaaaataggttcttaaattcaagccatattttcagacttgtcttatttctctataaacctttatatggaaccctaatctgacttgtcagaaaaataaaaaatagacccgttatctttcaagttgcctctttgttggctgcgatgaccgaacattaaacctacataatgtaacaatttcttatagttaatatatacgataatacattttgccgaataaattgcagaaaactattatagctcttaccagaatcatcaagaaatgctaaagttgaaggatatgaatatttcaaatgagcatgccatatgatccaggaaaaacgtgttattcgtcgaatccagtctggtggttgtgcgatccactgccaggattgtagcattagccaactgtgtattccttttaccttgaatgaacacgagcttgaccagcttgataatatcatcgagcgtaagaaacctatccagaaagggcaaacgttatttaaagcgggcgatgagttgaaatctctttatgctatccgttctggcaccattaaaagctacaccatcaccgaagaaggtgatgagcagattacaggtttccacctcgcaggggatttagtcggttttgatgcgatcctcaatactcagcatccaagttttgctcaggctctggaaacatcaatggtctgtgaaattccgtttgaaacacttgatgatctgtccggcaaaatgcctaatctccgccagcaaatgatgcgcttgatgagtggagaaattaaaggcgaccaagaaatgatactgctgttatctaagaaaaacgcggaagaacggttagccgcgtttatttataatctctctcgtcgtttcgctcagcggggtttctcaccgaaagaattccgtttaaccatgacccgcagtgatattggtaattatctgggtttaacggttgaaactattagtcgtctgcttgggcgtttccagaaaaaccaaactctcggtgtaaaaggtaaatacatcacgattgaaaacatggataagttgtctgagttagtcggaaaaaaatctgtttcaattacctaatcttaaaaccagatcaccttattttgttgatctggttctcctctaacctgttcggtttgcttatattggtttatctttagtattgaagcgtgagtattgaagcgtgttttgtctagcctctgtgaggataccattatggcaaactatcaaaaccttttagttgtaattgacccaagtcaggacgatcaaccggcattaaggcgtgcagtttatatcgtgcaacgtaacggtggccggattaaagctttcttgcccatttatgatctttcttatgagatgaccaccttactctccccagaagaaggtagtactatgcgtaaaggtgttaccagccaacgcacggcctggcttaaacaacaagcgtattactatctggaagccggtattgatattgaaataaaagtggtatggcataatcgaccttatgaagcgattatccaagaggtcattacaggtaatcacgatttacttctgaaaatgacgcataaacatgacaagctaggctccttgatttttaccccacttgactggcaattactccgtaaatgtccatgtccagtatggatggtaaaagatcagatctggccggaccaaggctcggttgtagtcgcggtcaatttatccaatgaagaatcataccaccatgaattgaacctgaaattggttaaggaaactcaggaactggcaaatcaagtcatgaaaaatccggaaattcatttggtcagcgcttatcctgttgcaccactgaatatcgctattgagctacccgatttcaacccaagtgtctataaccatgctctacgtggccagcatcttattgccatgaaagaattgcgccaaacattctgcattgatgaaaaatatactcatatccatgaaggattaccggagagtgttattccccaaatgtgtgatgagatgaatgcgggcattattgttcttggtatcctcggcagaactgggctgtccgctgcttttctgggaaataccgcagaacatgtgatagaccatcttaaatgtgacattctgacaatcaaacctgatggttttgaatgtccaattaaagccgctaaagagtaataggatgataatcatctatttggcgataaaacccgaaacagattttcgtcccagtttttatcgccagataaacggttcaggcagtgtcacaccgaggatctcctcacgagctatacgccagaaaagacgaatacccgctttaacttgataagtttcttttcccaataccttaaagattagaccacactgatggggtaaacgactggtaccactcgctatacctgtttcagcatcgtactgaggagccatccgcgccagaatacgatcgtgatgaagctgaggtgtcagcaagatcacattgccaaatacatgaaacggccccatcacccccacactgttcaatgactgctttttgggctccagtacataacgctctgtaaacaatatcttgccatcaaaatcagttgccgtaatacgtgatgagtaaacatcaaatttaaacccctgatcagcaaggtggtatttgcgaccggacataataatttcagaataaataagggtggcggtcggatggatggttatttgagtatcggtaataaaccgagagccgctgtgaggtattaccggatcgggcatcatttccagatagcctccctgctctatctggatagtttgtacttgcgctgcgtagttattttccatcgaatgaatcttagtcgccgattgggtagtgacatgaccaaacgcctctggagcgacatgaatgtccagcgccaatctatccccttgcaagatacatcccgatgtggagatcataaatacgcacggcatctgcggcagtgcctcatcccaatacaatgcccgctggaccaaataaggaacccgacgtttcatttgtgccaaaatgctgcgatcaccacgccgggcaaatcccaaccgtagataaccacttttaccgacatcaccgcttgccatctggggcggttcatcctgaaatcgtgcaagttccggcgcgttgacaccaagattatttgcctgttgacacgcttctccaatattttgtggcaagcgggtggaagtcattgtgtcgcctgtaatgaatgggtaaacaggaaatcacgcatgatcatatttaccaacgtttcaacaccctcaccggttttgcaattggtaaggatataaggacgctgaccacgtacaacttgagtgtcatgctccatcaccgccagactggcaccaacataaggcgctaaatcaattttgttgatcaccaaaatatcggcctgtaccaaacccggaccgttcttacgcggaattttctccccttcagcgacatcaatcacataaatataaaaatctgccaacgccggactaaaagtgagtgtcagattatcaccaccactttcaatcaacacaacgtcgctgtcaggaaaacgcgcttccatctcctctaccgcagcaatattcatactgggatcttcacgcaccgcggtatgaggacacgcaccggtttccacaccaagtatcttttcttcatccaaaatgcctttcaaggtacgtttaacctgtttagcatcctcagtggtaacaatatcattggtgataatcagaggttttattccgcgctgaattaagataggggtgatcacttcaataacggcagtcttgcctgaacccaccggaccgccaataccaattcgggtaatttttttcacaaggatttcctcatacgattaagagggggttaaaagcgatatcagaatcaagttaattactgaataaccgggtaaatgcgctaacgtgcaatgccgccagaacatcggtcatcggtgcataagatgtcatctgttcaatccctcccttttccgcctcatcacaaaacagttcaatatcttgattcaatgagaacaagatacgttgaatgtcaatatgggtaacacgcatcaggcgtatagccgcgctgagtatcgtcattgcaacgccatattgatgcatgacgatcacttcacgtggagccgcacccaatgcactcatgacgaccgccaaagtaatcggataggtaccggcggcaatatcgctctttatttgtgctaaccaccatgcaattaatgactcaccggtgacttcaaccgccatttccgctaactttttccccatccgcgtgaccatagtgcgactttcttcatttaatttgcggttgaatattgcccaatcatgggagatagccgcatcatgctgcccactatttagcgcctgacacgcagccattaccgcgcggccatcactactcaccgcctgtaacaacgctgtacgcgtaaagtcgcttaatgttgccacgtcatatacgattttgctctgaatggccgattccaaaccgtttgagaaagaaaatgcgccaacaggcagtactgaatccgcaaactgcatgattctgattaagcggagagcattcattttagtttgatcacatgctggttcagaaatgtattatcgacatgaacgtgtgtcgcggaatcctctgcaccaccgaataacaggcgagcctctgagttgttaagagaaggcaatatctcttcacctttaacaaaggagtaaggcaatgcatgaaaaccgtgggttttcatgactgaatccataaccttagttgatactgtcagcggaatataaatctgattatatttaatcactgatttccaatgctggttacctaaagcatgaccaagttcaaagctcgttttcattaccgtctctacatctaatgacagcaatgatttcaggtgaataaccatcacatcacgcaagctcatttgaacaataactgccagtcctttagcttcgtcccacaataaaacgtcgccatcagacaatatctgatgacggtcaagggaaatacccaaatccaacccgttaagggtggatttacgacaacggcttttttgcgcttcccattgcgaaagcaccaagatatctggcgagatcccttgcaagcgatctcgccagaaaacatcctttttggcattaccaagaatctgttcaataacaatcataagataatcctctgaacgcatggatcggttaatccggccagaaaaatattctctgaccggcagcaaaaaataggttaactaaagaaatagcgctgattgagcgcgactgtcctgaccggttttactgtggcatattcaccattcaccctgacggcaaaggtttctgcatccacttcaatcgtgggcgtttcagcattacgcaccatatctttcttagagatagcccggcagttgtgcactgccataacttggcgctccaaaccaaggctctcttttacccccagttccattgctgcttgggatacaaaagtgacacaggtttcctgaagagttttgcccaatgcgccaaacatcggacgataaaatgtcggttgtggtgtcggcagtgaagcatttgggtcccccatcaccgcccaattaatcatcccgcctttgatgaccaacttaggttttacgccaaaaaaacgtggctcccacagcacaagatccgccatttttcccacttcaactgaaccgagcacatggcttattccctgagcaatagccgggttaatcgtaattttggcgacgtaacgtaatacacggaagttatcgttatgtgctgcatcctccggcaacttgccacgcgccgctttcatggcatgagcagtttgcatcacacgcaaccagttttctcccacccgccccatagcctgagaatcactggaaaacatcgacagtacgcccatatcgtgcaaaacattctccgccgcaatggtctctggacgtacacggctttccgaaaatgcaacatcagccggcactttgggattaaggttatggcaaaccataatcatatcaaacaattctgcctggctattgataccgtaaggcagggtaggattagtcgaactaggcaacacattcatctggctggcaactttaatgatatccggtgcatgcccgccaccggcaccttcggtgtggaaagtatgaatggtgcgaccttcaaaagcatcaatggtatcctcaacataaccaccttcattcaagctatcggtgtgcaccgcgacttggatatccatttcatccgctacgcgtaaggcattacgcaatgcggagttagttgcgccccagtcctcatgcactttcaacccggcaacacccgctttgatctgctcaaccagcggcatagccaccgcagcatggccttttcccaaaatacctacgttaaccggtaaactctcaaaagcacgcagcatgcggtggatatgccacggaccagcggtaacagtagtgccgttagtgccatcagtgggaccaacaccaccgccaaagaaagtcgtcacaccattggataaagcatgttcaacctgttgaggagaaataaaatgaatatgggtatcaatgccagcagccgtgaggatgagatgttcaccggatatcgcatcagtactaacaccaactaccataccgggggtaacaccattcatcatgttaggattaccacttttacctatcccgacaatgcgtcccccttttatgccgacatccgctttaataacaccttgccgggcatccaaaatagtgacgctggtaatcaccaaatccaagatgttttcgctggtcattcggttatccgcacccataccatcacgcagcgatttgcccccgccatagaccgattcatcaccgtaaccgcgcagatctttttcaatttcaataaatagattggtatcacccaagcggatcttatcgccagtcgtcgggccaaaaagacctacatattcctgccgggaaatggttggcatagtttattcctttgttcgaaagattttccgacgttcgtcaactctaccttgaatttattcgattctactacccggcatgtaaccaggttgtctccacaggctcatcaatagcaaccggacttttacccgcccaaccatcgactaaattattaaatccataaacgttttgtttcccaccaatcgggattaatgacacttcgatttcatcaccgggttcaaaacgaatagcagttgttgctgtgatattaagtcgtttaccaaacgcagccgcacgattaaattgcaacgctttatttacttcaaaaaaatggaaatgagatcccacctgaatagggcgatcacctgaattacgaactcttaattgaataaccggacgatcttcattaaaggagatcgggtctttagccagaatatacccccccaacggagtaacatcttctttattatttttttccatcggaaaatctccacgttaagacgtgagtcaagacataagttaatattttgtctagataatttttcctgctatttacaatttgcttcaacaattattgaatggggtcatgcaccgtgaccaaacgactaccatcagtaaatattgcttcaacctgtacatgcggaataagatcagcaacgccatccatcacatcctctttagtcagaacatgcctggaatcatccatcacttcttccaatgttttcccctctcgggcaccttccaatgcagccgcagtaataattgcgacggcttcaggataattgagttttaaaccgcgagacttacgctttaatgcgacatcagccagtgtatataccatgagtttttcgatttcccttggtgttaattgcataaaaccccctaatcgtcgcgatgcatcctgaaatccattggatatagaacttaatacaatttttccaacagactttattcaaaagctgctgtccctatccgaatattgatttatacccgtcatctttcaagttgcctctttgttggccgcactcactcaccccggtcacatcgttatctatgctcccggggattcgctcccttgccgccgcgatacatcttgaaatcaatagggtatagataatcttttagtaaaaaatctttgacacaaagagcataatatgtcaattaagatcattcttctcaatacaggttagtcctcttacctcttatttaagtttatccaaagtaatattacaagctgattagtatgcccctacttagtgaaaaaattataggtcatgaagtcagaaaatacttactgttttttttgacttctagcaatcacccgtaaggcgggttttacatttacagatttacaggtattccatatatgaataattcaacggataaaaaacgtgctgtatctcttctggttgttttgattgccgccaacatattggcttggatttgggcatttatcgctttccgtcatcatgcggttatgatgggagtagccctgttggcttacggttatggactgcgccatgcggttgatgctgatcatattgccgcaattgataacgtcacccgtaaattgatgcaacagggtaaatcacccattgccgtcggcgctttcttttctcttgggcactctaccattgttattctggcctgcttcgccatcgttctaacctctatggcgtttaaagatcaaatgggctgggttcatgactatggcggcattgttggtaccttagtttctgcctgctttctgctagcaatagccctgattaatttactgatattaaaaagcgtctatcagaagtttcaggagatcaaacgtggcagaaatctggctaaaagtgatttaactacactagaaacgacgccgggggggatcatgacgcgcctgtttcactcagtcttccggctggtaagcaaaagctggcatatgtatttggtcggttttctgtttggcttgggttttgacaccgctaccgaagttgggctattaagtatatctgccgccggttctctcagtggacttcctctgtggtcgttgatggtattcccggcgctatttaccagcggtatggcgctcattgactcactggataattttgtgatggtgggagcctatggttgggcattttcccaaccgacacgcaaactctactacaacatgaccattaccgcggcttccgttgccgtagcgctgttcattggtggattggaagcacttggacttattgctgagcaatgggatttgcacggcgttttctgggataccattgggacattaaacgataacatgggcaatgttggtttttgggtcgtcggaattttcattctgttctggaccttatcagtgatgaattatcgctggcgggggtacgatacgctggaaattaaataacaaacgcagaactcttcacataaccgtgcgatgtattacatcctgaaatgttgttatgctcgctatctaatgatagcatttgtgttactagtgatatcattgtgagaaaggttatgcataaacaaacgaaacagacaataacccttcgcttagatgaagggttaaaaacacgcattaaagcgttggctgacacgcaaggcatttctgcccattcgcttatggtacgttcaatcgaaagtgaaattgatactttggaggccagacaacaatttttacgtgatgccgaaaacgcttggttagaatatgaagccaccggtttacatttaactggcagtgaactttgtaattggctggatgcgattgtacgtggcgaggataaggagccacctgaatgccatctgtaatagtcactcccgcagcaacaagggatataaatcgtcttattgatttcttatatcaacgcgatacagttgctgcgaagtcggcacttagtatcattagcaaacacatccaagcactggaatctaacgtcttatctggacggccaacagaaatttatccactctttgagttaattatcccttttggtggtacaggctatatattgttatacagagaacttcccggaagtaatacgcgttacattttggctatccgtcaccagcgagaaatcaactataagcactaacttaagcattaataactaatgaaccgaaaattaagtaaataacggatgtaatctctgtctctcaatcaaaatatgattgagagacagcaaaacccaacccgagttttgtaaattacaacgataaaaaatcacagtgcacgcaggatttcctctacactcgccttcgcatcaccgaacaacatttggctattgtctttaaagaacagtggattttgcacaccagcgtaacctgtgttcatggagcgtttgaacacaacaacattttgtgctttccaaacctccagaacgggcatacccgcaattgggctgttgggatcttcctgtgccgcagggttaacggtgtcgttggcaccaataaccagtacggtatcggtatcagagaaatcatcattgatttcatccatttccagaacaacgtcgtaaggcacttttgcttctgccaacagcacgttcatatgcccaggcagacgtcccgcaacgggatgaataccaaagcgaacattgactcccttctcccgcagtttggctgtgatgtcatgtaccggatattgcgcctgtgcaacagccataccatatcccggcgtgatgataacagaagttgagtttttcaatagttcagcaacgtcttccgctgtggtttcacggtactcacccatttcctgatcatcaccggttgaagaaccatccgtaccaaacccgccggcaatcacactgataaaagagcggttcatggccttacacatgatgtaagagagaatcgcccccgaagaaccaaccagtgcacccgttacaatcaacaaatcattgctcaacatgaaacccgctgctgctgcggcccaacccgaataagagttcagcattgaaaccaccactggcatatccgcaccaccgatggaagcaaccaaatgccaaccaaataccaatgcaattgctgtcataagcaataacgtgaacacttgcagccctgtactgtccgttttcacaaaggtaatcaacagcacaaaggagatcacaagcgcggcaagatttaatttatgacgatttggcaacatcaacggcttagaggaaatttttccacataatttaccaaatgccacaacagaaccggtgaaggtaatcgcaccaatgaaaacccctaagaagacttctgttagatggatattttccatcacaggttctgcaaaactatcgtgagcaataaagctattaaaaccgaccagcacggcggctaaaccaacaaaactgtgcagaatagcaaccagctccggcatttcagtcatttcaactttatttgccagacgaataccaatcaccgcaccgatcaccatcgccagaataacccagacaacacttccggtatcaggcccgaaaatagttgcaatcaatgcgattgccattccggtgataccaaaaatatttccgcgtttagaactttcatgacgagataaacctgccaggctgaaaataaataaaatggcggcaacaatataagctgctgtaacgactccactcgacattagttaccccttagtccttacgaaacattttcagcatacgttgagtgacagtgaagccaccgaagatattaatgctggcaataagaacagcaataaatgagaagaaacttacccatccaccatcaccaatttgtaataacgccccaacgacaataatccccgaaatggcattagtgaccgacattaacggtgtatgcaacgcatggctgacattccagaccacgtaataacccaccacacaagccagcgcgaaaacagtaaagtgagataagaactcttttggcgcaacattggctaaccaaccgaacaagataaccgccaatgccaataaaccatatttcaaccaaggtgaaacgggtttcgccgctggcttttctgctttaattgatgccggttttgcctgcggctgggccgaaacttgaatgggtggtgccggccaggtcatttcgccctctttgacaactgtcacgccacgaataacaacatcgtcaaaatcaatattgatttcgccatttttctctttacacagtaatttcagcaaattaaccaaattagtgccgtagagttgtgaagattgtgttggcaagcgacttggcaaatctgtgtaaccaataattttcacaccatttgcagtaatcaccaatttatctgcttgcgttaattcacagtttcctccggtctgagcggccagatcaacaatcacgctacccggcttcatggattcaaccatctctttggtgataaggcgtggagctggttttcccggaataagtgccgttgtcacaatgatgtcaacttcttttgcctgttcagcaaaaagcgccatctccgctttaatgaaggcttcggacatgacttttgcatatccgtcaccactaccggcctcttcttcaaaattcagctcaagaaactccgcccccatgctctgaacttgttctttaacttcaggacgagtatcaaatgcacgaacaaccgcacccaagctgcccgctgcacccacagcagctaaacccgcaacaccggcaccaataatcatcaccttggctggcggaacttttcctgccgcagtaatctgacccgtaaagaaacgaccaaattcgtgagcggcttcaactattgcacgataaccagcaatatttgccatagaactcaatgcatccagcgactgtgctctggaaatacgcggcactgaatccatcgccaacaccgtgactttgcggtctgataacttctgcaataactcagggttttgcgctggccaaacaaaactaaccaacgtactcccttctctcattaatgctatttcatcatcctcaggagcattaacctttaaaataatatctgaacgccagatattatgacgatcagtaatttcagcacctacttgttggtaagcactatcctcaaagctggctaaatgccctgctccactctcaacaacgacattaaatcccaatttcagcaggtgttccacggtgttcggtgtggctgcaacacgtgcttcattggcaagtcgctccttcggtacaccaatacgcataatgttcccttcctaaagcctaagattaatgatgattattgcttgctacagtcaatttagcgactatacccgttatctttcaagttgcctctttgttggctgcactcactcaccccggtcacatagttctctatgctcccggggattcgctcccttgccgtcgcgatgcacctcgaaatccatagagtataaattaactttatgactattaactttattactgccatcagtgaaatctatcaacaaatattttgataacaaattgaaaatattatcgatgatagataactaatgcgtaaaaaaataactaactgcctatctcaatagggctattttaactggactacccgctatgttgataaaaacttatggcgctctacccttaaacttgcattcattcatactgatagcataaattcgtgggacattagctattattacatgtaataattatcggctatgtgatgcacaaccatgttcagcaagttacaactatttaatgcgcaaggtggaaggattttttatgaagctgaaaacaacgatcattgcagcagcggtactctcattaacgggtattaccactgttcaagcagctcaggagttatccccggagaaagcagcagagctgaaaccatttaaacgtattacagttacaggcccttttaatgctatttatgaagctgccgatgcggtttcccgtcgtgcagacaaaatgggtgcagatgggttttatatccaaagccttgacgatctaaataatagcggcaatctgcgcgttacagctgatctgtatcacaaagatgcagagaaaattgataattcacctaaatatcgtctgttccgcggcatcaaagaattacccaaagcagaagctgtaacgttggaaccattcgatacggtcactattaacggcttttacgacaatgaacccgatttgaatgaagccattgccaaagaagctaagaaaaaaggcgctgcggctttctttattgttcgtcaggttgcaatcaatgatggcggtaatcagacggtgacagcttatgtttataaagatgatgcaccaaaacgccaaattcaggctgatgaagccgttatcccggcagattccgattctggacgtattgcattggctgctggtggcgaatcagctaagaaagtagaaattcctggtttagcctcttcaacttcaaccagtaattctgttggccgcttctttgaaacccagtattctaaaggcaaacgctacactgtaactcttcctgatggcacaaaaatccaagaattaaataaagtcagcgctgctcagatggttccttttgattccatcaccttttcaggttactacaacagcatgcctgatgtttcttatgaagtggctaaacgtgccgcggctaaaggtgctaagtactatcatattacccgtgaatggcaatccagtggtggaacctccactatcagtgcagatctgttcaaataatcaaaaacaaaaaaaggcacacatgaccatcatatgtgctttttttatttgtaaagataataaagttcttcaaattagttagcggattccaactttgaaccgatacaatcaatggcgttctgtatcgtcactattttttccgcttcttcatcatcaatagttatcccgaaatgctcttctagagccataatcagttcaacattatctaacgagtcggcacctaattcctcgaatgtttgtgtattaagaatctgggtttcaggtattccaagttgttctgcaacaacacttttgacgcgattctctaaattttccacgctgtattttcctagatgtaccaattacaaggggaaacaggttgtttccccattcttcattaacactaagattaaatatttacacaaccgtcagatgcatgaatgctcctgtgaatctggcactttcagggataaaacataacagacgctgatctttcttcaatttacccgacttcataagctcatccaacatgatataaatagaagccgatccggtatttcctttcactgttaagttagtaaaccaacgctcttgttcaatactaaaattaatatcgtcaagaccctcggaaaatttcatgcggaaatattcagatgagtaatgaggcaagaaccaatcaatagattctgaagataagttacgatcagcaactatccgtctcaatggttcggtaagtgtgaatttaacgaccctctcatttaaatatctgacatcttgtttgatgcagaaaacagaatatgcaagccaatcagcctgactcatttgagcccaacctttcaaactgccatctgctaacttttctccacctgaatacatacatgtctcttgctcattagcaaaagagtaaatatctatccaatcaattcgtaatgaaacaccatcaggtcgaggtttattttcaagtaaagcagcgccggcaccatcagaaagcatccaacgcagaaaatctttttcaaaagcgatttcagggcgtcgttccagttctgcaacccgagcttcgttttcactctggaaattgcgggcatgcaatacagtggaaggtacttccgacgttgttgaaaccgcattacttgtcgctcctgaaagaacggacaaataagcatatttcatcgctgtcatacccgcagcacaagcaccggaagttgagataacttcacagggtttatttttgagctctccatgaaccatgacaccatgacccggtataatttgatcagaagtaccactgcttgctgccagactttgcatatcgtctaaagagaagtgttcatcaaccaaaccttttactgcctcagccgctagttgagcagatgtataagttgcctcaccggtctctggatccagtgcataatggcgatatttgatcccattattgcgaaggactatatgacgagatcttgatggacgaccaccaacaaaaccaaggacagattccattgtattattatctatcgggtttcccggcataaacgcggaaactttagtgatataaacgttgttactcatttacttatttatctccttatcatcatagcgggcagaaccagaaggttgttcatagtatttctgtaattcattaagacgttcttttagtaatggggaaagcaaacggcgcacaaccactgaaataggaaaaacaaccagtaccatcaatatcaaataggttacaaacaacgctaataaagagcgtcttacccatatccctcgtttgcccacacggcaaatcaacccagaccaaaatctaaatcctcgatgtgccgcacgttcaccgaaaataaaagcttggtcgacaaccgccgctcccatacctttcaacattggagcatcaactttctctttatccgttttgagcgctgccaacaatgcatcaccaaaacgtgtagcatctttaacgtcttcctccgatacacccgcccggggtaagttagggaatggctgtctttttcctgtcattagccatatcggggttgtgaatactgtcgcaaaaaagtttgctttatcaacaaagaccacgttatcacgcaaatacgctccactttcatgcaacaatcttttgacagtttcttgagctatcaaccacatgtttcggcaagcaataactgtcaccactggtcgaccattaagtaaacgctttccttcttcactcttaagaaatgccactatcggaggagccggtgataaataccaaacttggtagcctaatatgaccaaatcaaaaggttcttcgtcttccagattcaaaggcgctagctcaggcggatgtaactgcactgtttctgggaaaacatcaacaaatttagaaaacttccagggaaattcaaattcaggaatcggtttcagaataacttcacggatgtatatctcgtcagactcttgcaggggtgaaattaagctttttaccacctcgatcaattggccgctttgggaatacgacactacaagaacacgtttcatatgttctaacctttatgaatatttaatactgagccattcatcggcacctaaaagataaaaatttgaatgacagctatcccctaaccatctgagaatattttttggtatacgtacatataatcattcctgaaaattaaaaacatatatacccgttatctttcaagttgcctctttgttggctacactcgctcaccccagtcacatcgttatctatgctcccggggatttactcccttgccgtcgcgatgcatctttaaatccataaggtatacaagaaaaataagttaataaatcgcagagtaatattttcacaaacaatataaatcaaaacagtcgttgtcaacatgatttttttatttttatataagattagttttatatcacattgtggaaatttaattagttactgatagaaaaatcaatgaaaaatatattaacttgaatataaaattcacaaaatcaattaaaatcaaaaaaatatttaaataaaatcaataaattaaaaaaacattccatatgttttaatttgataagatatccataacattatgaaattacatatccaatagattaatttaataatctgacatgaaaacaagagatgattattacttagcagtaatattacataaaaaaatgaaaattagaggtaaaactttatttttcacaactattttattaaattttgagatcgatcgaaaaaattaaaataaaaattacttaattagtaataacaccatagtaattcatgcttattacctatttaccttagtacaataaacagcattataaaaataacgcatatcagcttataaaaataaattgcatctcaccacacccaaactcaccatcaaacaatgcataaattttatagttatttgcatagaaaaccattgcatccagctcatacccttcgtagaatccccccctatttctaggttcaatcagtctgtttctccgttctgtacagcttggaagcgataaaaacccgatacccagttcatctttatgatcaggataatgaactggttaataatgcagtttatgtcatattaggaacatatttttggaaaagaaactaggtctcacagcgcttactgcgctggtactcagctctatggtcggtgcgggtgttttcagcttaccgcagaatatggctgaaatcgccagcccggcagcgttaatgatcggctggggaataacaagtgtcggtatcctgttcctggcgatcgcactgttactgctctctcgtcttcgtccggatcttgatggagggattttcacttatgccaaagagggctttggtgaactaataggcttctgttctgcctggggatattggttatgcgcagtcgttgccaatgtttcttatctggttatcgtttttgccgccctgagcttctttactgataaagggggcattgtcatctttggtgacggcaacacttggcagtccctattgggagaatctattctgctctggttcgtacattggttagtactccgcggcgttcaaaccgcagccggaatcaacaaattggcgacaatggcaaaattgctgcctttaggtgctttcatcatacttgccgccattgctttcaaaatggacatctttcatttcgactttaaaggcatcgatttaggggttcctgtctggcaacaagtaaaagataccatgttgattaccctttgggttttcattggtattgaaggtgctgttgtggtgtcagccagagcgaaaaaacggacagatgtgggtattgcaaccatgctggctgtcgttgcggcgttaacaatatacatcttggtcaccctactctcccttggattagtaccacgacctgagttagcagcaatgcgcaatccatcaatggccaacctgatggtggggcttgttggctccgccggtgaaatcattattgctgccggattgattgtctccgtctgtggggcttatctgagttggacaatcatggccgcagaagtgccatttatcgctgcccaacacggctcttttccaaaagtatttaaccggcaaaaccgcaataatgcgccatcatcttcattgtggttcactaatggcgctgtacaactctctctggttttgatctggttgagtggaagcaactacaattcattgctgacaattgcatccgaaatgattttagtgccctatttccttgtcggggcatttcttttaaaagtcgcttttgatcgtagcaataaggggttattactcattgctgttggagcatgcatttatggcatatggctgctttatgcatccggtttgatgaatttgctattgtctgttgttctctatgcaccaggtcttattgtttttttgtatgcacgccgccaaaacccgcagaaaaatagcttacatctggctgaaaagctcactattaccgcattgctgataacagcaatccctgccactgggttgctaatcaagtaatcccgtcagatccagccattattcccctgtaatggctttctggattttcatatagcagtttgtttagtttttcgttgttctatcatatttttgttagtgttatctctaaaagtatgttgtaactaattttgttaatgcaactcgatgggtatgattatttaatcaatttttgtcgaattctaaaattattcaccccgtgttgaaggagcaaatcaagatgattttcaaagcgactatgttgatagatgtattcctgatcatcatcggcaaagatgtaaaacagatatctattttgtcctattggaatcgtctctgcctggagcattcgcaccgcaacaaattcagtacgaatgccctgataaagatcagatattctcctcaaattatttcagtttatcggcccaatcggcaattgcattgccgcctcgatcggcttttcggccggtagcgcatggctggcaccttcaatcactgcgacagtaacgcggttgccgaactcatccttcgcctccattcgagacgattcaggtcgaaacggatcggaacccgcctgtagatcgaggattggtgccgtcccgccagcccaccaatccttgcgattggttagcttacgcgccgaggactgactttttataacatcagaatgccacccctcaagccaaggcgtcgggtcattgcctgccgcgaagaaggcaagcttaagtttcgtcagccgctcctcacgggtagatttcggatcacttatcaccatgatcgcatccgagagctccgagggccaagatttcgccgccccagccaaaagtacgatgccacgcgtcatttcgggataatccgaggcaatcgtcttggcgatccaatggccataagcgtgccccaccacaattgccttacctccttccgccgcaactactgccgcaaaatcgtcggcaaagtcgtggaaagtcacattttccatcggaccagtcgaccccgagattccgcgtggttccggcagagcaacgcgatagccgcgcctcgccagtcgatctgcgagtggcgcgaattccgcggttccccgcccggttgaagcaatcaccacgagcagtggccccttccctcgcaccgaatattcgatcgatgccacgccattggtgacagttttctgctctgcttgcatggccgaagccggatgcgcgacggcaaacacgatggacaaaaagcctaatatcaagacgaactgtttcattttcctcccttacagggttaattgtgtgaagtgtttataccctatggatttcaagatgcatcgcgacggcaagggaacgagtgcagccaacaaagaggcaacttgaaagataacgggtatataacgtcaactaagataagcatcgctataaacaataaatatagaaagatcacattagaagactatagagtaatttaatccaggtgacttactccattagaataaaaattctcaaagagaaaatgacagcgagaggtaataacataaaaataatagaacaaaaaaataaattcttaagagtgataaattaattgtgatttatatcacaattaattttataaccaattattaatcaaaagatattcgcattaattagcataatgatttattacatacaataaatcacgttaatattaaaaaataatcctgtttaagaaataaatacagataaaagtcttaaatgcaatacattatcgagtcattctttggatttttcctaattaatcgctatgatcgcccggctttaccccaaaaaagacacagtttaagttatcgttgttgttatcgggtaaaagctatattccctacggatttcaagatgcatcgcgacggcaagggagtgaatccccgggagcatagataacgatatgaccggggtgagcgagtgcagccaacaaagaggcaacttgaaagataacgggtatagatatttacacgctgtattgacgtttatacagttcccattaaatcagtatttctattgccctgacgccatgctcgacagggttaggatctatttaaaatgaaagctaaactgattatttcatccttacttgcatcttctgtatttatttctgtagcaaatgcagcagacggaaaaatcaactttacaggtaatatcatcgcgaatgcctgtaaaatcgataccgactctgcaaatcaaaacgtaaacatgggaacaattagctcaaatgcatttagtggcgtagatagtaccgcggctgcaacaccctttagcattaagatgagtgattgcccaccagaatatactcatgcacaagttaaatttgatgggcagatagataatagaaataacaatctcctggccttatccaatgataaaggccaggaagtcgccgatggcgttgctattggtatctatgaagaagataactcaacgctgattcctttggcaaaagcttccaaatcccaggcttttactgatcaaaaaacagcagaattgaagttcattgcaaaatatgttgctacagctcaagcaattagcccgggctcaggtgatgcagtcgccaattttacgattgtttataactaagacaggctaaatttagaacggaactttattcacgttttgtctctaatagagaagtacagggcatggatgcccacaaaataacgcataaaaacacgataaaacggagatgctaccgtgcagtatcaacgcctattcacagtaatttttctatatattatcagtataaatttcgctatcgctggtgtcgtcattggtggaacccgtgttatttacatgagtgacaaaaaagaagcgtctatttctataagcaacccggagaaagatgcaccttacctaattcaatcttggatccaagatgaaaatgataatatgaagactccttttatcgttactcctccgatctttaaactcgcagcagaccatgaaaatatcctgcgtattgtaaaaacagaaagtaacctacctcaagatcgggaatcacttttttggttaaatgtaaagtctattcctacctcggtgaaatcaaatcagaatcaattacaaataacagttaagtcaaagtttaaattgttttaccgccctgcaaatttggcagaaaagtcaagtaccgcatacaaagagctcaaattccgtacggaaaataattcattgatcgcagagaaccccaccccttacttcatttcattctcttaccttaaagtagatcaacatgaaataaaacctgcgggcatgattaaaccctttagccaactaagctggcctctgccggcaaagaacataaaacaggtaaattggaaagcaattaatgattttggtggtgctactgccgaggaaaaaacaaccatttaataaaaccactacattactctacgccagaaaattaattatgggaaagtgctcacagcataagattaataagcaaccatacaatattgaacattcatggctcttattattgccatttataactgttggcgtacttttttacccggctaaaacttattctgaagattatttcaatattcatgctctggaaataggtactgattttggttcacctgaagacattgatctctctattttcacgcaagatgactatccgcccggtatttactgggtagatatttaccttaatagagataaaatagatactaggaacgtaacctttgtcacgataaataataaattgctacccaagctgacaattcagcaattacaagatatgggagtaaaaattgatagctttccagagctgatcagtttaccaccagaaacagagttgtctgatctaagtcaatatattccatcagcaagcaccaccttcaattttagtcagcaaagactggatatcagtattccacaagcaatattaaacagtcaggcaagaggttatgtttcgcctgaattatggcagcaaggattaacttcattactgattaactataattatagtggttcaaatacctggcaagataatccatctggttctacgcagacccattatctgaatcttcgaacaggtgctaattggcaagcatggcgcttacgcaattattctacctataccagtcgtgataagagttggaaaagtattaacacctatttacaacgagatattcacgcactaaaaggacaattaacgctaggtgacagctttaccccctcctatatttttgagggtgttcaattccgtggcttacagttagtttctgatgacaatatgttaccagacagcttacaaggtttcgcccctagtgtccgaggaattgctcaaagtaatgctcaagttacaatcaagcaaaatggctatatcatttatcaaacttatgtttcaccgggtccatttgtcattaatgaccttttcccaaccacaacaagtggaaatttggacgttattatcaaggaagcagatggtcaggaatatcgatctactcagtctttttcgactataccgattatgttacgggaaggaggcttgcaatattcgataacactaggccaatatcaatcatcaaataatcgtgggagagagcctaattttacccaaggcgcattagtctatggtttttctaataatatcactgcctacggtggtacgattttttcaaaagattatcaatccgttgctttaggatcaggttataattttggtatattgggttctctctcttttgatatcactcacgctaacaccgatttaccatctaatataagtaccaaagggcaatcctatcgttttcaatatgcaaaagacctctcattaacaggaactaattttactctagcaggctatcgttattcgactcacggtttttatgattttaaagaagccaatgatatagagaattccaataaaagcgactggcgttaccgcaccaataaaagaagcaaattacaactgcatattaatcaatctctgggaaattttggcagtttatatctgtccgcctttcaacaaaattattggcaacaacctggctatgaacgtaatatcaacgcaggttatagcaccaattataataatattaattacagcctgaattatacctatagccaacttccagatacgaataaaaatgagcagcttttttcattcagcatacagattccattagatcgctggctaaagaatagctggaccagttacaattttaataccaataaaaacaaagatatttcccaccaagtaggtttaagtggcacagcgctgcaagacaataatttaatttatagtttacagcagagttacaccaatcacggtactggcgctggcggtcatattcatgcggaatataaaggcgcttatggtcaacttagtactggttatagttatgatcgtcattctcaccaattgaattatggccttcaaggaggcattgttgctcacccatacggcatgacgctttcacaacatttgggagatacattggcattagtccgggctgatggcgctcaaggaataaagatccaaaataatgttggtattgctaccgattggaatggttatgcagttattccttatgtcagcagttaccggaaaaatcggattgcactggatacgcattcattagcagataatgtcgatattgacgttaatgcccaaaccgttattcctactcgtggggcattagtcctggccgattttaaaacccggataggtcacagagttctcatcaatctctattatcaagaaaatcctattccttttggtgcagttgtcacattagaaaaacaccatgacattgatgaagtaaatagcgctattgtcagtcatgaagggcaagtttaccttactggtttacccgatagtggacgattattcgttaaatggggctataaagatattcaggaatgtgtcgttaattacaacttaccggaaaaaactcctttatccggtatttatataatagcagctcactgtaaataaccacccacaggaaaacgctatgtttaatatttacaataaatttaaatattttctcattatcaccaacttattaattggtttgatagtcagttcttatagttttgccgctaactgccagtttgagaaaggatttaaaccagaaatcactcatctctcctttggaaccttatatgtgccaagagatcaagctattggcacaaccatttacgaatatcgtgcagatgaattagataataaaaataatatcttctattgcgatacaaacattaatacatcatggggatacacatcctacaaaagtgcagaatacaacaaggatgctgtttacgagtccggcgtccccggtgttggtatcagaataaatacttggggccccggctatggtatcgactggttaccccgtattgctaataaccctgtaagctgtgacaattctggtcgttggtattgtggtaaaacatggggttatctgacaattcagctaataaaaatagcaccaacaacaggttctggttttgtcagaaacgaacaattaattcaggcacgggtaaataatcatatcgtgcatacttaccgtttgggaaatacccgaattattactaaaagctgctcactgaaaaataacaacgttactgtccctatgggcgatatcaaaaaaagcgatttttctggcattaatagtatcgcaggagggaaggattttgaggttattttagattgtgatgatgatgtccagattcaattaatgcttgacggaaagaaagcaaaaaataacttatatcatgtctgggcgcttgatcaaaatgataatcgcacaactgcttccggtgtgggtatgcaaattctttacaacaaccaacctgtcattatccattcacaaataaatattggtaatagctattcaggtgggaagttatctatccctttacacgcccgctattttcagaccgatcgcaatattacccctgggcaggcaaatgtaactgcaacaatgactttaacttatcagtaataaatttatctgcatcagttatagaaaggttatttcttgactgatgcgctgttatgttattattttatctgaaaaatttttaagaaaattcagcagattacgataattaacacgttatgcattagtgataatagcatcaattgctgagagaatttctcctcgggaaatgacaacattacatataaaatcttttttctttattttattggcgtcaaggaatgtaatagccggagtaaatacataatatttatcaccattgatatcaactaccggcgtaatacgtttacgagttagttccatttctcctgttgaagtcagtggaacaattaatcttgttgataaattttcaaaataatcatgctgaataaccagataataaggccaaaatttattagattttgctgaaggattacgataaacatcaaattgcgacatcaaaggctcccaaaaaactcatcatcagtaattatccctgcacgttctaagaacttattaattacctgtatactctgcgcatcttccttttgctcacattttttagcttctacagcctgcgccaaaagttcatccagcgtagccgataagttcatattcaggctacgggccgcgtctaccagatctgttgtgaggtatacgttagtgcccttcttggctccaggccgcgtaacaattgtagatctcatagtatgacctcctatgcttaaagttatgcgcataattgtaatccaatgaacctaaaagaaacaaggggattttagtgtagggttttatttttgagtgaattaatctaagagctaatcttacggattacggattttcttagaaaggtttttcttccatcatacctttaatgctctttcctatcccttcattcatttaaatcttaatttattaatttacaaaaaatttattttatttacaaaattatgcttttaaaaatgtttattaagtttaaagttaaatttcttaatatttactaatggaaacaagttatgacgtggaaatattcacaaggcactggtgtacttacacataatggctcttttattgcaaagggctatagcggtcatggagctggaataaataatccctctatggaacaggttgaaggtgaagggccaattcctcgtggttattacagaatcaacggttattctaactcaataaccaaggttaccgtgatattagatcctattatgggaactaatacgtttggacgctctctttttagaatacatggtgacagacgggatggaacataccgtcaggcatcacatggctgcatcattataaacggctataatctcagaaaagagatagccaactctagcgatacaattctggtagtcgaatgaaaaaactgatcctgtttttaatgctagtttcatttaactcactggccgtggatcgccatattacagctaaaaatccatatccgaatttaacaccagagcaattgagcctacaaataaaacagcaaggtgcaagagcagtaattaaaaatatgccagaaggggataacggagaatggaattatataacagatcatattgcaagtggagatataacatggctcaaggtggctcctttacttgcaaagggaagtgatgcccattcatcagaaacgctatcaacagcattagcaactgcattacctaaaaacgtaaacggagtattatctattcttgatgattccaatgtttcaattagcactgattctgtttgtttgctctctacttctgtaagtttggaatcaaatctattctctgactttgttaatctggcgtcaaacttgccctctacttctgtaaatttggaatcaaatctattctctgactttgttaatctggcgtcaaacttgccctctacttctgtaaatttggaatcaaatctattctctgactttgttaatctggcgtcaaacttgccctctacttctgtaaatttggaatcaaatctattctctgactttgttaatctggcattaagctgttcttcacttggtttcttagacaaagtattattgattacatctaatttttgcatgataacagcaacgtcggtcttcattgtgccaacatcactgatgactgatttcagatcagccttcacatcgctcattgtggctttgatatgctcaacgtctgattcaagttttgctacacgagcttccaacatatcaccacctccaccaccattgccgtttccatacttcatagtattgggcaaatgtttatgactttcaatagttgctatatcattggcagagaattcgtaaatcttagccatcacttaccttccactttagatgtaacaacaaaataactctcatttacgtctatacccgttatctttcaagttgcctctttgttggctgcactcactcaccccggtcacatagttatctatgctcccggggattcgctcccttgccgtcgcgatgcatctcgaaatccatagggtatataactttgctatctgcgctgcctaattcccccgaatacagctcaccaataagcttataaacaccttcattgggcaagtgaaccctctttaatgtcattgatgaaaccataatatattggtctgtagacgtaaaaccagacaagtgaatgtatgctgtatcatttcccttatcttgatcatcaagaaccgatttatcatcaacgaacacgtcaattttagtgtaatacaactcatctttacgcaagaaaacgcctaaagctacattaagatactctacagatggaaaactatcagcatatatccacatactaggagggtgcatcacatcaattaacattccttgtctgatatgtaccgggtaagcaaatgatattttctctaacgtcatgatattcctcatatgtttactgctgcttcacattcgatactattgcttctgtaagaacaaatccataacggcaatctccgtttggtggacaggacttaattaaaacaaagtgctggataaaaaaccagcactttgtcaataacctgagccacctttagtcttctttgatcaggaagcaatttgctccatcgtttgcaaaattctcttatccgagaccggatatggcgtgcccagttgctgagcaaacaagctgatccgcagttcttcaatcatccaacgaatctcttgcacctcaggtaactgtttctgttgcagtgataatttcgccagccattgctgccactgttgctgaacattttcgacacgccccatttgcgctctatctctgtgcggatcaatcgccaatttttcaatacggcgctcaatgccttgcagataacgcaggacatccggcaaacgtttccaaccattagtggtaacaaaccctttgaaaatcagaccagaaagctgctctttgatatccgataacgccaaggccagcgaaatatcaattttccccttaaggcgtttattaatagcaaaaatggtggtgagtatctgttccacttgcttagctatttccacgacagtatcgttcaactcagcccgaactttgtcctgtagctgaataaaaccttgctcattccaagcgggcccaccattcactgtcatcaatttatccacaccacaagagatgcaatcgtcaatcaaatccaataccttgccataaggattaaaatagagccccaatttggatttattcggcaatttctcatgtaagtatttaattggtgagggaatattgagcaacaacaggcgacgggtaccttcccacatggcaattttttgctccggttcggtttcaaacaatttgataccgatactctctttttcatccaccagcgctggaaatgctttgaccgagtaaccaccacgtttctgctcataccgtcccggtaattcaccaaaactccaaatgtgcagcccactctgttcaattccatcatcagcaacagcggaaagtgtctcctgaactttctctttcaagcgtaatttcagtgcagataaatctttaccttccgcgatagtccgattcttctctcctaccactcgaaatgtcattttgaggtgctctggtacttgctctaactgccaatcatcacgtgacaccgtaacacccgtcattcgccgtaactctttctcaaagctatctaacaaggttgattgcggttgaggtacccgctccataaatgcctgagcatagtttggtgcagggacaaaattacgacgaaccggtttcggcaatgatttaatcagcgcaacaaccagatcataacgaataccggggatctgccaatcaaacccttcatccttaacctgattcaacaccggcagcggaatatgaactgtcacaccatcagcttgcatgcccggctcaaactggtaactaagccgtaatttcaatgccccctgataccagtaattagggtaatccagcgcactgattttatcggcatcgcctttgatcaacatatttttttcaaaattaagcaagtccggttgctctttacctgtcttcatccaccagcgatcaaaatggcgagcagaaaccacatcctgaggtagccgttgatcatagaaactaaacaaggtttcatcatccaccaaaatgtcacgacgacgggatttatgttctagctcctcaatttcctcacgtaatttcagattcgctcggaaaaatgcatgtcgagtttgccagtcgccttccaccagcgcatggcggataaacaactcacggcagagcattggatcaattttgctgtaattaaccagacgactagccacaattggcaaaccatataaagtgactttttccctagccattatcgcaccctgagatttttgccagtgcggctcgctataatgatacttcaccagatgcccggctaacggttcaacccattcaggttctattcgcgcagcaatacgtccccacaagcgactagtttcaaccaattccgctgccattgaccacttaggtggtttcttgaataagccagaaccaggaaaaatagcaaaacgggcattacgcgcaccagtatattcctgtttatcggtatctttttggccgatatgagataacagcccagaaagtaacgcagtatgaatacctcggtaatctgcctcctgactatttaccgacagaccaatttctttcacaacttgtcgtaactgggtatatatatcctgccactctctgactctcagatagttaagataatcttgacggcaaagcttgcgaaattgcgaagaggagagtgccttttgctgctctttcaaaaaatcccataatttcagaaatgcaataaaatcggagtctttatcagcaaatcgacggtgtttctcatcagaagcctgctgtttctccagtggcctctctcttgggtcctgaatagatagcgcagaagtgataaccatcacttcacgtacacaaccatgttgacgagcttccaataccatacgcgccagccgaggatcaaccgggagctgagcaagctgtcgccctattgatgtaagacggtaatgactcttagccattgcgccttgatcaatagccccaagctcctccagaagccgaacaccatcctgaatattacgtttatcaggcggttgcacaaatggaaatgcactgacatccccaagaccaattgccgtcatttgcagaatgaccgatgccaggttagtacgcaggatttctggatcagtaaactctggccgagaaaggaaatcgtcttctgaatacagccggatacagatcccgtcagatacacgtccgcaacgcccctttcgctgattagccgacgcctgtgatatgggttcaatcggcaatctctgtactttcgtgcgataactgtaacggctaatacgtgcatacccggtatcaatcacatatttaattcccggtaccgtcaacgaggtttctgccacgttagttgccagcacaattctccgccccgtatgtgactggaaaatccgattctgatcactgttagaaagacgcgcaaataatggcagtacttcggtatgacgcagattcagtttattcagcgcatcggctgtatcacgaatctccctctctccactcataaagatcaggatatccccaggcccttcacggttgagttcatcaacagcatcaataatggcctcaagctgatcccgctctccaccattatcttcccccatgacaggacgataacgcacttctaccggataggttcgaccagaaacttcgataattggcgcatgattaaaatggcgagaaaagcgctcaggatcgatagtcgcggaggtaatgatcactttcagatcgggacgttttggcagtaattggcgcaaataacccagaataaaatcaatattcagactgcgttcatgcgcctcatcaataatgagcgtgtcatactgtttaagtagcctgtcattttgcagttccgccagcaaaataccatcggtcatcagtttaatcaacgtgttatcacccacatgatcactaaaccggactttataaccaacagcagaacccacggaggtttccaattcttccgccagacgattggcaaccgcgcgagcagccaatcggcggggttgagtatgaccgataaggccctttattccccgacctagttcaagacaaattttcgggatctgggttgttttacccgaaccggtttcaccggcaataatgacaacttgatggtcacgaatagctttgtagatatcatctttcttctggctgacgggcaagttttctggatatttgatcgttggacaagcagcctgacggttaatgattttctgagactctttcacttatattgatccttgtaacttcttaactttactgattagccagcttttattgatgacgcagttcttattgataacatggttcttattgacgactatagtagcatatcctatttattggcaataatttcagctgatatttccaccacgttatatcaacgcggataaaagtctttcaataaatttgaatcctattctctaaatattgatctgttaccataagtcaataactcataaaataactatatcgtgattaacaaatgaattaccaaaagttaacttaaggaataaacatgagtaaagttctggttcttaaatccagcattatggcgcagcattcacatactaaccaaatggcagatttcttcattgaaaagtggcaaaccaatcatgccgatgacagcattacagtacgcgatctgactgcacaatccattcctgctctggataatgaactggttcatgcattgcgtccgagtggcaatgaaatgaccgctcgccaaaaagagacgttagcactatctgacgaactgattgcggaattgcaggataatgacgttattgttattactgcacctatgtacaacttccacattccaacccaactgaaaagctattttgatatgatagcgcgtgctggcgtgactttccgttataccgagaatggcccagaaggtctgctaaaaggcaaacaagtcatcatcctgaccagccgtggcggcatccataaagatggccccagtgatctgttagtgccttatctgcgtctgttcctaagtttcattgggctcactgatatagagtttgtatttaccgaaggtgtcgcattaggccctgatgccgcaaatcaagcgcaacaaaccgcccgtgaagttttgcaagcaatagcttcctgatagccacttttttgttcatagttcatacatttatattgctgttttttgcgcgtcattcgacgcgcttttatttcttcaaccacttaccattaataccacgcacatactcaccaggttcagctctattcaccaatttttcgccagtaagtttagccacttgctctgtagaaatattattgccagccgcaatttctgcgtattttttctcacgggcttgattaatttctgccaccaaagcttgtgcctgattatctgttttcactatagccagataaccactgaaagtttcaccaaccaatcctttctgctttgcctcattcagagtcattcctacaacggaagagctgaacaatacactagccaataacaatattcccgtacctgttctcttcatcatgccaaccccctagaataaacccgtgttattcttgagcatctcttcaacttgcctgtctacttttatctgaatttcatgctcaattttgacattcatattaatattaatgggcttctccggtgttgccacttcaaggcgtatacaacctgacagcattaaaggccccattgatagtaagaacagcttcattccagtttgttttgtcatttatcactcccatttaatacagagatattttgctgtaaccaatcttcaagattgttgccaaaccgtaagctgcgccataagtgaaagatattctcttcatgatggtaattcagcttgacttgccgttttttatctcttaatgaattaacaccttgaatttcagcgctaagtgccagaatccctaaattatcaagactgagctgcgcccgtaaacgactgatttctaaatagcgtaaccaatccatagcggcaccagcggaaatattatctttgttaatggaatctaccgtgtctttatccagacgtaaggtcatatggtcgatattggtaatctgaccttgctgaactatccaacgttcattattaataaacaacggcaattttccgctgattttgccggatatcgcaaattgtttgactttcaacacagtaagaaggcgacttaactccaatttatcaagcgccaaaatagcaggatgatgctgaggaagccttaatttatctaagttaatctgtccatccaatatacctacattcacattagtcaattccagcggtttttgttccgatggtggataaaatccctgtaagtccgccgtcaagttacgcatttcaaacaggttattaatcgttttcactcgtagttgaaccggcgatttaacaccaaattgccagatactctctttcagccgccacggtaagacaaaatcaagtccactgatttcaccctctttaagccacatgctgccattttttactacccagtgtccccccgcaacaaaaccttgccctcgtgtggcagaaaaagcggcctgcgcataaagatcacctgatcgtaagtttatgcctaaatctttaggtaccaacggctgaaatgcaagtaaggattgagtaggccaacgcgcttcaccacgcaatcttgctccatcccaacgactgtaaaaagggatcggaccaatatttcttgatgaaagatcaccattaacaataaagttattcgggctttctcctgtcaattttgctgtcagctcagcagggggcaaaaagccaccggaccgaaatgatgttttcttcgctgtcagccgtaactcacccttaaaggcgggcaatttctctgaacgttgccattccaatggttttgttaattgtagacgcggcgtatccacccgaatcataccgtgcttaatcacattaaaaccggtagtcatttcgttgacgttaatcaatgtgtcatgccaacgcccttttccaacgatatcccatttagcctgtagtggcggcaaatagccatctccccaatagttccaacgccaatagcctttatccggcataaaatcctcggcatgaccatctagatgcaaacggaattttccccagtcacggtgttgcgcattaacaatcgcctgtaaccgacccgtaaaaccttcacgtgtcagataagttcccgctaacggtgatcgggcatctttaaccataaactcatcagacaatcgcccccaaacccgaaacaacgaacctgactggaaagtcattttcggattaaccagcggaccatcaattatcgcaggcaatgacatagccatcatcatatcctgcacattaatctgacccgttaattgcaaaggaagttgcgtatttaatgaatttatccggcccggttttatcgttaacacaatattcgctttaccacgtttaccctgagtgaccaaatttatacgaccactcattagcaggttatccaacccttgttgccaatgagcaatcttaatattcactcctcccgcaagaggttgttccgcactcgtccactgccatttaccatcagtaatatcaaactggtcttggttaaactgccaaggcaattcggccaaaggtactgttgtcccctcttcgccgataataagtttgccggatgtccctcgccaacctaacttgatattcagcgggtgcgcatattgcctggcaataattttaccttttacatcaccatgaggcggtaatttgtccacattaagaggtaatgtcatttcaccattaaggctgatttcctgttctggtaatttaattgccagttggtcaataactagcgattccttaccataaatatgcgctgacaatttaaccttcttcccctgataactgagttcttgcccctgagaagaggaattgaattctagtcttccagcaaaatcttgccagggatgaaaagaaagattttccacggacaaacttccctgtggaataagagctaaaatatcagcaacagacagtggatcatggctttgtgtcgatttaggtaactgatttaggcaattgatatccccgctaatatctgcggcatttaatcgccaatgataactgttatctatctctgaatatgggtaactaacagataatcgcgatacacgaataagcctgcaatccttcacctgcaatgaaatatcatccaattgcaaagccccatttttccattttggttgtttcaatgaaaccatcatacctggaggtaaccagcgaccagtgaccttaggtaaccaatgaggaatagaaaaccatcccactgctatcagcaataccgataacatcagtatggtaatgaatatttttaaccctttggttatcaaacctttacctctccttattaagccttagatcggttacttctatacccgttatctttcaagttgcctctttgttggctgcactcgctcaccccggtcacatagttacctatgctcccggggattctctcccttgccgtcgcgatccatcttgaaatccatagggtatattgttattccataatttagcagacacgtcttaaactaagacattgattattaagaaaattatgttgaacatataggggaacaacaagcaatacacttatagagttaattaatttattggtttatttaaccctttacgtcagcaataatttaagcccaaaacaatttattagctacttaaattatagcggagataattccatgaaattagtcgtttacagtaccaaacagtatgaccataaacatctggagcaggtcaataaaaagctcggatttggttatgatttcgagtttttcgatttccctctcagttcaaaaacggccaaaaacgctattggtgcagacgctgtttgtattttcgtcaacgataatgctgaccgtaaagtgcttgaagaattagctgaaatgaatataaaaatcctcgcattacgttgcgcaggttttaataatgtcgatctagatgcagctgaagaattgggtattcaggttgtacgggttccagcctattcccctgaagctgttgctgaacataccgtcggattaatgttgtgcttaaaccgccgtatccaccgagcttatcaacgtacccgtgacgccaatttctctcttgaaggcttaattggcttcaatatgcacagccgtacagcgggaattatcggaaccggcaagattggtattgcaactctacgtattcttaacggatttggtatgcgtctgctagctcatgatccctaccccaatcaagctgttttgaatctcggtgctcaatatgtcgatctggatacgctgtatgcacaatccgacgtcatatctcttcattgcccgttaacaccagaaaatcatcatctgctgaatgaagttgctttcagtaaaatgaaaaacggcgtaatgatcatcaataccagccgaggggctctaattgattccgtcgcagccattaacgcattaaaacaacaaaaaattggcgctctgggtatggatgtttacgagaatgaacgcgatctcttctttgaagataaatctaatgacgtaattcaagatgatatttttcgtcgcttgtcttcgtgtcataacgtgctgtttaccggtcatcaggcatttctgacagaagaagccttaaccagtatcagtgaaactacgctgagaaatatccagcaattaatcaacggaaaaaattgcccaaatattgttagtaagtacccttaaaataatatataggagataaacatgaaaaaaatactacctttggcaacagcaactttattgttagccacattccaagcgtctgcggtagaaaacgtgtcagttgatgatttacaacgtcacaaatttgttctagtgagcgttaatggcgaaggcgtgaaaaatcaagatggtcgcgtaccaaccattgaattcggggaaaaaatgcatgtttctggttccatgtgtaatctcttcatgggtcaaggtaaactgaaaaatggtgtactgaccgttaaaaacctggccagcactcagatgctttgctctgatgaaaaattgaatagatgggattacctgattggtcaagtattagccgatggcgttaaggtgaagttgaaagatcaaaaactgacactatctcaccccgacaatacattggtttataaagttaagtaatcaaaaaaatcatttataacattagcattaaacatttagcagagtgaaattccttgaatggactcaagattaaactctgtttatccaaatgttttatgtgttaggtgccggaaattattctccggcacttccagatataatatctaaacaataaatttaccactggcattaaacttttaaacattataggagaaccaaaatcgacataaataaatatagataatataacttatttttaacttattccttctaacttaaataaagagttatacactttttacatttaataaatagtttactaactaaataaaaggaaataatttatgtccaatattgcactgactgatattcaatttatcaacctcatgaacgaaatgcgccaacacgcaagacatatgttaagtggttctaaaactgaaccatttatgccatcaacacctgaactccaggcatatgcaaatatgcttggggaacaatacgaaagtatagatgttactgaaaacaaggaagtagatggtattattaatcaattgaaagattctgtgaaatctggtgctaattcaacagtaaacgtctctaagacaagtgtaactaatagcacacagaaatatcaggaagcgattgccactgatccagacaatgcagaccaagactggatcgataacatgaataaatctcgtcaaagaaccaaagatgagaacaacagacaaattgatacaagttacgataaagccattcaattcggattacaatttcctaatgccagagcagcaatacaaagttttatggaaaaaactaatgcattcttctccagtttatttggcagactttcaaattttatacttgatgccgccaggcaactctctgaatggataagcagagcatgggaatcaattaaatcgttctatgataaaattaatgtttggatttccggcgctttgtaattaattgataatggttcgagttagttcgaaccattatatacccgttatctttcaagttgcctctttgttggctgcactcactcaccccggtcacatagctctctatgctcccggggattcgctcccttgccgccgcgatccatcttgaaatccataaggtatattcacctcagatataacctaagtaaattaattacttattaggcagtttgatcctggaaataattgccagtctatccatataatattccgcatgaccccacaaccaactctgctctttactaacatcatcttcagctaaaatatttcttaattcacaggtcataacatcatagccataaacataaagcccaaactgtaacgcctcatacattctggcttgccaaaaagaggtgccttctattatttgactcatatttgaagcaacaacatcataggctttaatcagatagtggaaaaagattttagcggccaaatcacttaatgccgctttatgttgtggcttcctcgttcgccacacaagtatctgcgaagcgagacgacagttaagcaccaaatcacttaatataataactttgttgtaataaacgacttcttttgtttcgtcactaagtagcgctaattcaaagtagggctcatctatatcatccaaatctaacctgttatcaaccctgatcaaccggtaaccaggtggaaaaatgagttcatccacatcatgcacaatattagtaccagaggaatcaagagcatcatacagaacacgattgaactctaactcactcaattggatgaaatcattggtaatcttttctatgtttcccacatgtattggcatactttatgcttcctataatagaccacaggttcaattacctaatggtaatagtatagatgcaattatatatatccgtcatctttcaagttgcctctttgttggctgcactcgctcaccccagtcacatagtttgctatgctcccggggattcgctcccttgccgtcgcgatccatcttgaaatccattgggtatacaatcaacctttagttcatttttgggggatatgcccactggttaacttcgctcttcccaacctgggaaacacagaaaataatttattaaattataatgagttaaatcattatcaaggtttattaataatatgatcttcccattctacaacatcaatttcccgtacagcgatgtgcctaaccgaaattctttcgctatgcattgctgatttagaacctttaatcagaggatgccacggtaataatggcttcccttcttctagcaaacgatatgcacaagttattggtaaccatgcaaaagtcggcaaattataacgggttaatttgatacaatccggttcatatctgaaacgatcttcgtaatttttacattggcacgtttttatattgagttgattgcaagcaacattagtaaaataaatttcatcggtatcatcatccatcaatttatgtaaacaacactgcccacaaccatcacataatgactcccattcttcatccgtcatctgatctagggtttttacctgccagaaaggctgagacataacttctactattccttatattattcaaatcactctggtagtgagtgaattatcattcagagtaacctttaacacatcaccaggtttcagtgcgccaacaccttccggtgtaccagtgagaatcacatctcccggccgcaaagtaaaaaagtgcgacatatggctgatcaggggaacgatgggtgtcaacatatcgttactattaccgttctgccgtagctcattattgaccgtcagtgaaaactggacattctgtggatcaccaaagtggcttattcgaataaacccagatatcgggcaagagccatcaaacgccttacttttttcccacggttgacccgcttgcttgaatttagattgcaaatcacgcaaggtgagatccaatgcaacagccaaacccgcgatagcggcaccaactcgctcttcatttgcttgtttcaacggcgtaccaatcagtacagccagttcaacttcatgatgaacaacaccaaaatcctttggaatggcaattggctgatgtatatcacacagtgcagtttccggcttaataaaaacgactggctcttccgctggcttagaccccatctctttaatatgtttagcgtaattactaccaacgcaaaccactttattgacaggaagatccagtaatgccccctgccagtctctgtgttgatacatattcgtttctcactctggtttatacccgttatctttcaagttgcctctttgttggctgcactctctcaccccggtcacatagttttctatgctcccggggattcgctcccttgccgtcgcgatccatcttgaaatccattgggtatattaggcaacatacccataattatagcacttattgccccatcttatcggccaccacgccaagcgtgatcgcaaaatagggaaatctttcctttgagaagcaaaccagattgtttccctttaaaagcacaacttattgtgaatattgtggtggttaataaaaccgcgccgacggttaattttgctcatcaaacctctggattcttcttatttttccatctggctcagatgtgcattcattaagttttcaaccggaggggggatttgcaggtaaaaaccctgttcaattaacgatatttttaccttttcgatgtcagcgcctgctagcttttttctgtctgccagagagatcatcattgtatattggggctgtccaaaacttttcagtaactcttcgggaacacgagagaaattatctcttttttcaacataaagatatgtttgctcccttttcggactgctgtagatcgcacaaatcattataataaactcttttaaattcaggtcacaacttgcttgaataattcagtaattataacatgtttattgtatttctaaatatcgtatcccagggggtgttctggggggatctcaaatttgctgaatctgagtcaggcaggatagatgtcacagtcgccaattgagctaaaaggcagtaattttacgctttcggttgttcatttacacaatgaccaaccagaaatcattctacaggccctacaggaaaaagtggaacaagcaccggatttcctgaaaaatgcaccggttgtcattaatatctccgctctgccggcagacgctgatctgaaagcactgcatcacgctattgattcagcaggattccgtattgtcggaatgagtggttgtcgtgatgagcaacaacgcagggcggtaataaaagcctccttaccactactgagtgaaggaaaaaaacaaaaaacctcggcaaaggaagataaaccggccgaacccgcgattaaaaaaacccgtgtaattaatttacctgttcgctcaggtcaaaggatttatgcccaaggcagtgatcttattgttaccagtaatgtaagcgccggtgccgaattgattgcagacggcaatattcacatctacggtatgatgcgtggtcgggcattagccggtgcatccggtgatcaggagtgtctggttttttgcacccacttaaatgctgaacttatctctatcgcagggcaatattggctcggcgataaaatcccgactgaattagcaggaaaagccgcaaaacttagcctggtaaataatgaattaactattgaacctttaatctagcccttttaataaggaatcacttcatggcacgcattattgttgttacatcaggtaaaggtggcgttggcaaaaccacttcaagcgcggccattgctaccggccttgctcaaagaggtaaaaagaccgtcgttatcgattttgatatcggcctgcgtaacctcgatctgattatgggatgtgaacgccgcgtagtttatgacttcgtgaacgttatccaaggtgacgtctcgcttaatcaggcattaattaaagataaacgtaccgagaatctttatatcttgcctgcatcacaaacccgcgataaagacgctctcacctctgaaggcgttgagaaggttttagttgatctggataaacaaggtttcgattttattatctgcgactccccggctgggattgaaagtggcgcgttgatagcactctattttgctgacgaagcgatcatcacaaccaatcctgaagtctcttctgtacgtgattcagaccgtattctgggtattctagcttctaaatctcgacgagctgaacggggtgaagatccgattaaagaacatctgctattaacccgctataacccaggtcgtgtaagtcgtggtgatatgctcagtatggaagacgttctggaaattttatgcattcctttaatcggtgttatcccggaagatcaatctgtactgcgttcatctaaccaaggagaaccagttattctggatacagaatccgatgcaggaaaagcgtatacagatactgttgaacgtttattaggggaagaacgtcctttccgcttcattgaagaagagaaaaaaggcttcttaaaacgcctgtttggggggtaaaacatggccttgctagatttctttctgtcgagaaaaaaaacgacagcaaatatcgctaaagagcggctgcaaatcatcgtggcagagcgtcgccgtggtgactctgaacctgcttatctgcctgatatgaaacgggatatcttggcggtaatctgtaaatatatacaggtcgatcctgatatgctctctgtacaatttgaacagaaaggtgatgatatttccgtgctggaactcaatataacattacctgaggcagaagaaactcaaaaataacgcagataaacagggctgttttatcattaccgccatcaaagtaaccaaactcattatgtggcagtctgagatggggtaaccctaacgggaacccctttctcgcgctttagcctggcatcaggctaaggccctgatatggattaatcaggatagttcgccagaatctctgcaactggctcagccagcaattctccccgccatccactaagcagttcaggtttgtcatttaattgtttcaagttccagtgaacactaagtaattgattaatctgacgacgagatgccaataattcagaattaaatctatgctgttcactgacttgatggatcagcgccttaatatccttaaatgctttgcgataacccggttgatcaatcaagttcgtcattggcggcgggcattcactttctggaatatttccactttcagcaaccattgccaatagacggcgaccatgacaacgaatctcctgcccgcttaaccctaacgcatccaactctgccagagaagttggcatataacgcgctacctgccacaagttttcttcacgaatgacgaagtttacggctaaatcgcgttctctggcctgactcaaacgccatgcagccagttttttcaaacacgcaagctgttggggacgtaattgacaaatattgcctatctgtttataagcagattccggttccaatatctctttacggcgtcgactgataagccgacactcacccgtcgcagcctccatatatccggcctgcgcggttgcagtcatcaagatatccgccaaaggcaacagataataaacatctgcggctgcatattcacactgtttttcgcttaacgggcgagcaagccaatcagtgcgagattcgcttttatccagctcgacatgaatatattcagccaccagcgcggcaaagccacatgaaagcgggtgcccaataaaagccgccaggacctgagtatcaatcatcggttctggcaagcattgaaaagcattcagaaaaacttccaaatcttcactgccagcatgtaacagcttcaatatttgaggatgagtaattaactcacggaaaggttgccagttggtgatattaagtggatcaatcagagaaagttgttcgccatcatacagttgtatcaaacctaattgcgggtaatacgtccgtgtgcgtacaaattcagtatccaatgctacttttgagtatttttttgccccttcgcaaacttgttgcaactgagcatctgtggtgatcaactgataattcaaaacatagttctcttagccattcatggaataagcacgacaacgccggctaataccggcgttgtcgtgcttatcaatattatgaagaggatctcaggctatgctacattcctgaccttttcctcttcatcacgcagttccctacgaagaattttacctacattagacttaggtaattcatcccggaactcaatgatctttggtactttataccctgttagataacgacgacaatgggttttaagttcatcctcggtcaaaccaggatctatccgaaccacaaatactttgacagtttcaccggaactttcgcttgatacccctattgctgctgactctagcactttagggtgagctgatacaacatcttcaacttcattaggatacacattgaaaccagaaaccaaaatcatatcttttttacgatctacgatatgaatggaaccctgttcattaacattcgcaatatcacccgttgctacccaaccatctttcaacacttcttctgttgcatcaggacgattccaataaccggccatcacctgtgggccccgtatccacaattctccctgctggcccatctctacctcattaccatcatcatccacaagtttgatttctgttgaagagaccgggaaaccaatactgccagtgtaatgtttcgaattataaggattacaggaaaccaaaggtgaacattctgtcagaccataaccttcaagcaaattggtgcctgtcacttttgcccatttctcagcaaccgctttctgtaccggcataccaccaccaacaaccagacgcagcgtagaaaaatcaagcttcttaaattcttcattattcaaccaggcgttaaacaatgtatttaccccggtgacagaagtaaacggataacgacctaattctttagctgtacccgtaatatcacgcgggttagtaatcagaagattgcacccacccaagtaaataagtaacaagcaattcaccattaacgcaaatatgtgatagagaggcaacgccgtaacaatcagctcttggcctacacgtaataatggagaataaaccgcttttgcctgttcaagatttgccaaaatattacggtgagtcagcatagcgcccttagctacgccagtggtgccaccagtatattgcagaaaagccaaatcattaccgttaatctctggttttacatattgcatgcgataacctttctgtatcgcacaacgaaatgaaatagcatcaggcagattatacttcggtaccagccgtttgatatatttcaccgcaaaatcaaccagcgtacctttaggacgagatagttggtcacccatacgcgtcaaaataacatgcttaactttagtattaaaaacgatcttttccaatgtatgggcaaaattggagacgatcacaatagcggaagtgccgctgtcattaagctgatgttcaagctcccgtggcgtatatagcggatttacatttacgacaatcatacctgcacgtagaacaccaaacagtgcaacgggatattgcagcaggtttggcatcatcagcgcaacgcgatctcctttacttaatcccaaaccattttgcaaatatgctgcaaacgcccgactacgctcttccaacttacggaaggtcataatctcacccatattgataaatgcaggttgatctgcatagtgcgctacggcattttcaaacatctcaaccaatgatgcataacgatccgggtcaatctccgcaggaacatccgccggataatgttttagccagactttctccaaggtagtactcctgaaattttaattgctatgttatcactcgcctaataaataacgcacgctttgatttaacaaattattaactcagcgtaccagtttaaaaaagaaacattgttcaggttgagatacacatcactaatttcacgttaatcctgatacataaaaacaaagggaattgtgttatctgtaaattatttttatttatcagtatattattgccatagttaatatttaactttgtagctattgattatacattgacctacttattttttgcttaagatagcatttttgaaatagcatttattgctttcatctattccaatgcattattaaaaaatcaatattaataaaaaatgattatataccttatggatttcaagatgcatcgcgacgacaagggagtgaatcaggtattcagaaacagcaactttgggtcgctgaaagtgagcaaaaactggttggatttgcgctaatccgccgcttaaatcaattgatgctgctagctgagattgatgtgttgccgaaatatcatggccaaggtattgccagtaccctgcttagcgtaatcattgagcaatgagaacaaaacaaggaaaccacactttacctcataacttttcgtcattttctaccaagtcgcaaattatatgacaaattcggttttgtcatactgcaatcgcatgatattcctaatgaactacagaaaattctagtagaagtgatgactgcgggtttcggtgcaagaattgcgatgaaattaacgatcaatccaaagatagagaggaaataacagataaattaccgccacatattattgcggcggctcaaactggaaagaaagttacaatgtcacaaagtagataactctatctggtcaaaatagtctcaacaggtgtggggtcggaataccaattccatccccaacctgaataatatggatagccataataattccaaggccccgggccataaggcatcaatactctctgaacaactttccagcgttgataacccattacattaatcacaacataatcgtaatccgcacaaccaattttcccctttttcaatcccactatcggacctacgacagtgacgtaatttcctttaaaatcggcaggatcaaggaaatcattaacataaacatagatacggccaagggaaggctcatctaattctgggctggcatccgatgctaatggcaatgacgatatttccagacgagtacgatgattttcattcactacaccaagtaccttgccgccgaatcgcccttcctgaccgataaacaactcaggcgtactcttaacagaaagcagatcttgaacaggcgttggtgacgttccttttactgaatcaggaacggtgatacagcctgtaagcattacaacacctaacaagattagcgccttaacactcgtccggtagtttattactcttaacataaccaccttctcctgaaaatgatgtttaaaataactctatctatttgatactttcttttactacaagtttcatcaatagatacttaacggcctggtaattttttccaagtaacttcattacgcaagtataccggttcagcatgttctacagccgtcacctcaccgttttgccacatctgtattgccagaggtaacatatcttcagcatgaggtaatgtgatactactatcagttagcgttaaatgacttgccatcaactgaggataagcctgccagccagtacccgcaaccacccaatcgccactcaatgaagccatgaatgcctgtacctgttccggcttcagcacggcttctgtttcacgtccttgccattcaccttgctgattacggatatattgcccccagtaaacctctcccatccgggcatcaatggcggttaatacctgagttgcacctagcagacgaaaaacaccttgagccattgcattgagcgttgacacaccaatcactggcagttcagcccccagagacaagccctgagcaataccaacaccaatacgcacaccggtaaaactacccggcccacggccaaaagccaaagcatcaagctgctgtaaactcatcccggcttctgccagaacagattgaaccataggtaaaatgcgttgcgtgtgttcacgtggagaaatttcaaactgtgccaaaacggcaccatcattccaaagagcaacagaacaggcttccgttgcagtatcaatagccagaattcgtacaggcatgcctcaagcacctcggcaagaaatataattcaaaataaagtgctattttatcatagcctagtcgattttacccagttggcagccatatgaaggccattaccctttgccatatgtacacaggggatagctgtgtttttatgaattatcagatagaaaagagataagtttacctgtgctccatcgcttctcaacgtgatctgctgctataattatggagcaatccttaattatgtcatgcaatagcctgaattccgttcttcttaactatcgtaagcaacctcaaggctgggcctccgggtttttttgctccacgctcccagtctgatataagatttttgctcacattcaaatatcgggcaaaaacaggctgtgacaaatgctcccgctcacgaagagaacgtatttcctctggagatagtgattctatgggagtcaaacaggcagcatcaaactcacgcatagtttgcttactgacagcccctatttcgcttaatgcctccatcgtttcgtgaattgcagcaaacgcatcactacgatactttttaaccatatttaatcacctccgaaaaatgacctttttcaattagtctagctaattgttcatctgataaccctaaaacgtgggacgccatcttcttaaactgcatctcttcatcatattcaatattagatctatcacttttagcaaacccgtaaacaaaaaaagcatgctctgcggtctggtacaaaatcactgtgcgaaacccaccagactttccttgccctttacgtgccacccgctgcttaattacaccaccgcccaaatcagcatcaatctgacctctattggctctttcaatagcatcaagtaaaacctcatctggaatacgctgttttctggcaaaacgctcgaaccatgcatttttaaatactttcaaaaagtagttccactattaaatcaattaaagtataacacaaagcatgacacaaaatggcgattaaaacaacaacagggattaatctaactatcaataataccctataaaaatatttactttacatagtattgcgtacagttatacctctgatgtcgatactcttatctgcactattagctcttcctcctttagtttaatttgtttctgttgctatatagattcataattgttcgctcaattagcagataatattttctacacttaacttaatctttaatgttaggagattgccgggcttgcaggaaagcgaccgctttcgttaaatctcgggttcgtggtgaaggcggcaaactattcaaaaacacttcaccatatggacgcatcactaaacgattatcacaaataacaacgacgccataatcatcaatatcacgaataagccgcccgacaccttgtttcaggctaatcaccgcatctggtaactgaacttcattaaatgcatcaccacctctaagttggcaatcttcaatacgggcttttaacagcggatcatccggtgccgtaaagggcaatttatcgataatgacacaggaaagcgcctcaccgcgcacatcaacaccttcccaaaaactgctggttgccaccaataaagcgttgccggcagcaataaattgcgaaagtagctgacccttgctagtttccccctgaaccaaaaccggcaatgtcatgttggcacggaatgcctcagccagactgcgcatcatctggtgtgaggtacataaaaagaaacatcgacctttattggcttcaatgagtggcttgagcatctctgccaaccattttgcactaccaggttgatttggtgatggtagatgacggggaacgcaaagtagtgtctgactttgataatcaaatggacttggtagtagcaacattttcgcctgttttaaacctagccgttcagtgaaatgggaaagttgctcgttaacagagagtgtcgctgaggtgaacacccaacaaccggattgctcattaattatctcactaaatttatcggcaacagacagcggtgtgagtgctaaaagaaaatggcgaccataactttcaaaccaatagctataaccggggatagtcacctctttcaagcgtttaagacgattacgataaattgttgccctttcaaatgccgcatccaacatgactgaacgccctaaagataatttcatcacgtcataacaaagctcaagcgcatcatcaagcaataccaatgcccgctgcacttgcggattttgcaataactcccgcaaattaccccgataaccgttctctcccaacgctagccggaaatcttgtgtactctgactcagacgatctgcgctcttttgtaattgaacttgatcccggacttccgtgcgatacgccatagtgatgtctctggagagatccatcagttgacggctacttaattgctgaccaaaatattgactggcaatatcagggatttgatgtgcctcatcaaatattttgacttctgcttgcgggatcaactcaccaaatcccgtttctttcactaccatatccgccataaacagatgatggttaacaacaataacatccgcctccattgcccgacggcgagctttgagaacaaagcattcctgataacgcggacaatcactgcctagacagttatcgttcgtactggttaccaacggccaaacctggctatcttccgccacttggtgacaagtactgatatcaccctcttcagtttgtgaagaccagcctcttagccgaacaatatctgacagaatttctgcttccaattgtccgcccccaaaagagtgctgttccaaccgttccaagcacagataatttgcacggcctttcaacaacgccaatttgccggtgaaattaatcgcttcagcgactgtcggtaaatcacgattatagagctgatcctgtaatgccttagaacctgtggaaatgataactttctgcccagaacgcaacgcgggtgctaaataggcaaatgtcttacctgttcccgtgcctgcttctacaaccaattgttgatgatttttaatcgcacactcaatagccactgccatttctctttgagcatcacggggtttaaaaccggttattgctttagcaagggcaccatttttcgcaaaatcgtctgacacaaaccgtctctttcaatagaatggatggagattatgccaatagtatgttctgatcaccacccaaaatcaggcagatagtcattcacaggaaggaatatccatgacaattgaacgtattgatcctcaagatcgctggtccgaagcggtagtttacaataaaaccatttactacaccgccgtaccggaaaacctggatggtgatattactgagcaaacagcgaatacactggccgctattgatattatgttacagcgtctcggttctgataaaagcaaaattatcgacgccactcttttcctggctgatggaaaagagtttgctggcatgaatgccgcctgggatgcatgggttattgcaggaagcgcaccagtacgctgcaccgttgaagctaaactaatgaaccccaaatataaagtcgaaataaaagttatcgcaggtatttaatattaattttgggatattctctatcgcctacatttatattttaattatatggaggttattcagaatatcccaataggtgttattaatataagtaagatatgatttcccctgttaatttagttgcaataacacgttaaaataaaacattaatcgatattttcataaactatattattcattgatccaagtggaatattataaacccaacaattctaaccttcctcctatgccttgaactatcggtgaccattataatgttcattaaggccatcaatgaccactataatggtcaacaggagggggaatgttaaaacatagagcctattcaaaattctctcaagaggcagttatgttactcggagaacaaatcaagttaggtagaaaacaacgccattggtcagaaaagaatttggcagaacgtgctggtatatccagaaccacactacaaaaaattgaaaacggggatatgggttgttccataggattagcatttgagctggccaaccttgtaggtatcagcttgtttgacagtgataaatttcctatctcagcacgtatagaacaaacaagagataaattagctttattaccacagcgtattcaggaagaaaagagagaggtatacgatgatttctaataacaaagaagttgtttagtcccaacatttgatggctagatatgctagttatgaaaaatttgccgagattatacgatatcgtttcactaatcctcagaaaacattagaagaattattttcacgattagtttttaatatactgtgcggtaatacagatgatcacgctcgaaatcatgctgcattttgggatggaaaaaatttaagtttaactccggcttatgatatatgccctcaaggtagatcgggtaatgaagcatctcaagcaatgttaatagtcgaaaataaaaacctcagccaattacaaacctgtttagaaactgcacataactttaatatctcagagaaaaaagcaaaagaaatctttaatagacaaatattaatcatccaagataattggaataatatctgtgaagaagctgagttaagtgaaatagataaaaaattgttctggcatagacaatttttaaatccattctccataattttttgagaactttaaaatctgtacataaacttattataaacccatcttacgggccaaaacacctacgctatttcagtaatggcccttaataattcattttggaaatatatgttatgtttgagccactgataatattctgatgatcaatgtaaataaaatagtttccaatattgcttatcacaaatagcgttaatttcatctggtagagttaacttaccaaatggattttctattatttaccttttcaatgttgaattatacttatacgtcgtccatactttctaataagcacatcagtgtctggtcactgtttagtgaatataaacatggcctaatcttcaataacttttatcacttggtatggagcattctatggatgtttgttcaggttgtcatgattcccttcatgattccgttgttgcggaagtagaaggcaagatctataaaagttgcccatgttgttccgccgcaatgggtcaacatgttttttatcgctatgaagactttggtatgagggatatgggtgatggccgctatattgttcagtcttggtgtcctggttgtcgagtaaaagatggccataaaccagacgtctgttttacctgctaaaagtcatctttattcatatctgctggttattatgcaaaatagttgctagttgcatgccagcagataatataagaaataaacaataaaatttgttacttaaaaacctgaacgctaataatgtgtctttatcctgattttaaaaattaatatggcttaagccatcttgatcatcaccatgcccaacagcaacaaggcaattccaccccaacctttataattcaaacgctgattaaacataatccagccagcagcaaccgtcgcgataataccgaaagcgccccataaggcataagcaatggacaactcaattcccttcactgcctgagcaagcgcactgaacgccccaaggacggcaataagcgagagaatccccatccaaggacgtctaaaaccattagaaagtttcagtaaaatattcgctaaaatatccaatacgacagcaaggaataaaaacgccgcatgccaccattcaaattgttgcaacatgttacgcctcctttattttactgcttttggttgttgcaacactgacagccttatttgccatctgcttcactacctctgccgattttttgactgcggcttttctcgtaccggatttaatcaacataatccctgttatcagcagagccaatccccctactttcatcaatgacaatgattcatcaaaccacatgacactaaaaacagtaataaatagaatgccaaccccttcccataaagcgtacgcaacgcccaatgccacttttttcaccgccattgccagcaagatataggatgtggcgatcatgatgtacataacggccatgccaactacaccaccggaaacgctggcatgtttcatcgataaggtaccgataacttcggtaataattgccattgcaaggaataaccaataaatcattttctttctcctgaccacgtaaatacgcacgtcaagacgcaagctataaatgatctaaacccacccatatataagatgagaaataataacctgacgtttttgacgaaatagaaataccggttgaaaaccggttaacaggagtcagacgctataatgaaccgcaccagtaatgctcactggataaaatggcagaaaggaaaagcatgtgagtggaactttgaaacttgacgcttttggcgctgttcatgatatctcattctttcatcgcaccgatattccgcgcgatatactaagaatcctcataaatagtgttaattttcatagtacttctaccatataagataatagaaagcaactgctcaccctcatttatttttttatctgataaacaatgttgaatagaaaaacagaattgataccaacataggctgataccttgttgatactaacccaagccgcttatagtacggcttgagcttcaacagaaaggtttgtcaattactcaaactcattccacgaacgaccatcgcgagtgatcatcgcaacagaagcgaccggcccccacgtccccgcctgataaggcttaggcgcatcattatccgccgcccatgcattcataatagaatcaacccatttccacgcttcttccacttcatcacgacgaacaaatagcgcctgaataccccgcatagcctccagcagtaacctctcataagcatccgccaacggaatatggttaaacgtttcagagaaactcagatctagcttagtggtttgcagacgatgcttgtgttccagccccggagctttgttcagcacttcaatatcaataccttcatccggctgcaaacgaatcgttagcttattctgcggtagttgttgataagactcagaaaacaagttcagtgcaggctttttgaaataaactaccacctcggaacatttcgttggcagacgtttaccggttctcaggtagaaaggaaccccggcccaacgccagtcatcaatatcgacacggatagagacaaaagtttccgtccggctggactggtttgccccctcttcttccagataccccggtaccttatgcccctgaacaaaaccagcagtgtattgacctcgtaccgtcttctcccgcacattcgtatgatcaatacagcgcagagaacgcaatacttttactttttcatcacggatacggtctgtcgtcagatctgccggaggagacatagcaatcatggtcaatatttgcaacaggtgattctgaatcatatcgcgcatctgcccagcttggtcaaaataaccccaacggccttcaataccgacttcttcagctactgtaatttgtacatgatcaattgtccggttatcccaattattcacaaacaaggaattggcaaaccgcagcgccaacagattcaatacggtttctttacccagataatgatcgatgcgataaacctgacgctcattgaaatatttagctacttcatcattgatggctttggatgattcaagatcggtccctaaaggcttttccatcacaactcgatttggctctttatttagccctgcaaggcccaatccgtgacaaaccgaaccaaaagtactgggtggcatcgcaaaataatggattgcaggccgattatcctgcttaagaattgccttcaatttggcaaagtcttctttttgattaacatccagattgcagaacgccaaacgctcactcaatatcttccataattctgaatctaatttttctggcaagaatgtatttaaagcttcttcaacaaccttggtataagcttttttatcccaatcagcccggccaacaccgataatccgggtttctgggtggatataacccgctttctcaagctgataaagggaaggcaataatttccggcgtgccaaatcccctttagcgccaaaaatgactaaatcacaagcctgagctgtagaagtaaccgccatatgtctctcctcgttgcgggatattgtaattttgttacagcattaaccgataatgtactcttttgaccatggcgcgtaaacagagataacgaataaccatcaccatgcgttaacaatatgtttctcatatgagaaaaatgtgataaatttatgtaattttccaacgtttatgaaagataattaccaatatgaaagttagacacttgtcatacttttatgaaaaacattaaattattgtgacttcctactgccagcttcaatttgctaatagtatattttcataaaaatttacatagatttctcttctgaatgaaatcgtcaaaaaccacaggtaactgcgttttatgaatacactggaacgggtccaaaacagtatcgaatttttgagtaagtcagaaaaaaaagtggcgcagacaatcctggcttcaccgcaaactgcaattcataccagtatcgcaacactggcaaaaatggcggaagtcagtgaacccacggttaaccgtttttgccgccgtctggatactaaaggttttcccgatttcaaactccatctagcccaaagtcttgccaatggcacgccttatgtaaatcgcaatgttgaagagagcgatacagtgagtgcctacaccaataagatatttgaatcggtaatggcaactctggataccgtcaaaaacaatttggatattacagccattaaccgagctgttgatttactgactcaagcccggaaaatctcatttttcggcttaggggcttctgcggccgtcgcacacgacgcaatgaataaatttttccgcttcaacatccctgttatctattttgatgacattgtgatgcaacggatgagctgtattaacagtgccgaaggtgatgtcgtcgtactcatatcccataccggcaggactaaaagcctggtcgaagcagcacaacttgcgcgagaaaatgatgcgacagttatcgcaattacctcccaagattctcccctcgcccacgaagcaacactcgccattcttctggacgtcccggaagatacagatatttatatgccaatggtctcaagaatcgctcaattaactgttattgatgttttagctacgggttttaccctgcgccgtggttcaaaattcagagataacttgaaaagagtcaaagaagcgctacgaaattcacgctttgataaaattgactttcccccgacctgaaaatagtccccttactattaggctgactcgcaaccattgcgtagtcagcgatcgtttatgactcagtgagcatcggtaaataatctgcactagccaacaagataagcgaggaattattgaattatatcaagaaaatcccatattatttagttaactcaataaaataatgaccgtttaaaattaaaacataggatattattataaaaaatttaccgaaagaaatagaaagcaggaagataaaaataattttcaaatattgaatataaactgtttagacatttacccgatcaacagtttcacatttattatttccactcattatacaaaaactattacccctctaagttataagaatactttattatgttttttccgagctaaaatattattgacatatattacttaaaattaattttttaataattcagtatgttgtttataaaagcacattatttatacatgaggaaaatatatgaatctcaagaatgattttaaagctttttctattggtaataatgctaatatagtcagtcaagaagcctatgaagaaagccgaagtttgaaaactgggttccccccaagcgatatcactattcatgtgctaaacaaagtattacgtcagtcatcaaccatctcctctgtcatcgctaattttatcacgacccaatctggtagtgatattttggatgatggtgatatcgctaaacttattactcaattaaatagcgcgttagaacaaaaaattacaacaactgtgccaaacgcctcattaacacaacaaggcattattcaactcacagataaaacaggcaatagtaatacccttgcggcaacacagaagcttgtttctgatataaacgataacgctaataatcggctagcaaaagaccaaaacggtgcagacattcctgataaaaatgcttttgtgagaaatctcagtttgttcgaaaaattgatcccggtaggggtaccacttccctggccgactaccaccccaccagaaggatgggcgcaatgtaacggcgctccctttgataaaacaaaatatccgaaattagcgcaagcctatcctaatggagcattacccgatttacgtggtgaatttattcgtggtttagataatggtcgtggtattgataacggccgtaatatattgagttttcaatatgatgcgttcaaaagacataatcatagtatttataccactgacagcccaagctccacccgtgcaaatacagatcccgtgcggggtagtctgcatggcagtataagcgatcggggtgactcaggggaaaataaaaccattgggatgaatggtgataatgaaacacgtccaagaaatgtggcatttaattacattataaggaccgcctaatgagtaaatccgcattggacaaaaacaatatggctattagcatattttcagatgttgaatataaatgatttatacccgttatctttcaaattgcctctttgttggctgcgctcactcaccccggtcacatagttacctatgctcccggggattcactcccttgccatcgcgatgcatcttgaaatccatagggtatagatatttacccgatcatacaatttcgggattttatttattctcattatccaaaaacagttacccctctaagtcataagaatattttatcatatttttttcaagctaaactattattgacatatattgtatggaatgacttttataataattcaatatattgattaaaaaatcaaattatttaattacaggagagaacatgagtaaaaaaaatgattttaaagccttttccattagtagtaatgctaatgtaattagccaagaaagatatgaacaagatcagggtttgatgactgggtttccaccaaaaaatattactactcatttgctaaataaggtattacgtcagtcatcaaccatatcctctgttatcgctgattttatcgcgacccaatctggtaatgatgttttagatgatggagatatagctaaactcattacccaattaaatagagcattagaacaaaaaatcacaacaaaagtaccaagcgcctcactgacacaacaaggtgttattcaactcacagaccaaacaggcgaaagtaatgcccttgcggcaacgcagaagcttgtttctgatgtcaatcagaatgcaaataaccgtctggaaaaaaaccaaaacggcgcagacattcctgataaaaatacgtttttgaagaatcttggcttaatagaaaccattattaatacccaatatcctgtaggaattgtgatttggttcgctcaaaataaaaaccccaatgtgctatttccgggtactacatgggaatatattggtgaaaataaaaccattcgattagctagcgccaatggctccgatattttatcaaccggtggcaatgatttgataagcctgacagcagcacaaatgccagcacataatcatacattttttgggacaacgagcacatttgattatggcaccaaaaccaccaatatcgccggagagcattatcatgatagtgggtggggtgaaactactggtgggcgttatggtcatttcgacggttctaagaacaatcagggatcaaaatctacagattggaacaatgccaaatttaacactagcactaatggtgcccactctcatacggtatcaataggagcacataaccatacaatttcaggtaacaccggagattctggtggcaatgcagcgatttcaattaccaattcatatattaagttaatgggatggtatcgaaaagcataagaaccctacatcccccgggccgctaacaaatctcacgcaaatagctgtctcttgatcataagtctgacttaagagacagtgccaactcgtcctcctcaaagaaaacttatcatttgcatactttacagcatacccaccctggacgtttcgtgctttccagccctcaagtgttgctgaatcccagtaaatttcagaaagcttgtatcagactcacacggcaagacggggagcagtcacattattgataaatcgggaacaaatcgtgataggatagaaatacggcaataaatatccgttgctgacactggtcaataggcactacagcgaaaagtatcatgataagttgatatgggtcacaaaagtaatctataaacaggcttgatagttggattgccgaagagtttttttactcgttttataccctatggatttcaagatgcaccgcggcggcaagggagcgaatccccgggagcatagataactatgtgaccggggtgagtgagtgcagccaacaaagaggcaacttgaaggataacgggtatataggataattaatagattattgattatttttatataaccaataccaatactcacaggtcaacggagtaacacatgtccagacggctcagaagaactaagattgttactacacttggtccggctaccgaccgcgataataatcttgaaaagattattgctgcgggtgcaaacgtagtccgccttaacttttcccacggtaccgccgaagatcatctccagcgagccagcaaagtccgcgagattgcagcccgcctggggtgccatgtcgctattcttggcgatcttcaaggacctaaaatccgcgtatcaacgtttaaagagggcaaaattttcctgaatatcggagataaatttctccttgatgccaatcttggtaaaggcgaaggcgataaggagaaagtcggtatcgattacaaaggactacccacggatgttgtaccgggcgatattttgttgctggatgacggacgtgttcaactcaaagtattagacgttcagggaatgaaagtcttcacggaagtcactgtaggcggcccgctatctaacaataaaggcattaacaaactgggtggtggattatccgcagaagccctaactgaaaaagataaagaagatattattacggcggccagaatcggcgttgattaccttgccgtctctttccctcgcaccggtgaagatcttaactatgcccgccgtctggcacgagacgcaggctgtgaaacgcagatcgtggcaaaagttgaacgcgcagaagccgttagcagtgataaaaccatcgatgaaatcattctggcttctgatgtggtcatggttgcccgtggtgaccttggcgtagaaatcggcgatccagagttagttggcgttcagaaaaaattaattcgccgtgcccgccagctaaatcgtgtagttattaccgcgacccagatgatggaatctatgatcaccaatccaatgcccacccgtgcagaagtgatggatgtggcaaatgccgttctcgacggtactgacgccgtaatgctctccgctgaaaccgcagcgggccaataccctgccgaaaccgttgccgcaatggcacgagtctgtctcggagcagaaaaaatgcctggcctcaacgtatcaaaacatcggctagacacaatttttgacagtattgaagaagccattgcgatgtctaccatgtacgcggcaaaccacttaaatggagttaaagccattattgccatgaccgaatcaggccgcaccactcgcatcatgtctcgcattagttctggtctcccgatattctctatgtcccgtcatgagaaaaccttaaaccaaacggcactttaccgtggcgttacaccggtttattgcagtagtcatactgacggcattacggcggccaatgaagcagttaatcgcctgcgtgataaaggttatctagtttccggtgatcttgttctggttactcagggtgatcagatggggacgattggcagtactaacacctgccgtattcttgaagtggaataaagcgccacaacattttgcgtcaaacgcgcatcccgcttaatccaacgacaattcgacggtaaaataagcttttaccgtctcttattgcttttctatgactctgatcgcttatatacccgtcatctttcaagttgtctctttgttggcttcactcgcgatgcatcttgaaatccatagggtatatatctttgtagctaaaatcacaaatcttctctcccatagggcccaatatcacccgctttccgagtcttaagtaatttaagtatccaggtatattgttcagggttcggtcgcaccaattgctccaactcttcattcattcggcgggcaataaaagcatcatctttgccatcaatatcatccattggcggacgaatataaatatcaagctgatgagtacggtaattataaaccggaaacagcggcacaatagcagcacgacaaaccttcatcaatcgcccaattgccggcaatgtcgctttataagttgcgaaaaaatcaacaaactcactgtgctcctcaccatgatcttgatcaggcagataatatccccagaaaccctggcgaacagcagcaacaaacggtttaattccagcatcacgagaatgtaaacggccaccaaaatgatggcgaactttattccacagataatctgcaaccgggtttttctggtgatggaacatggctgatattttctgtccgcccacagacagtaatatcgctggaatatccacagcccaaccatgaggcaccatgaaaataacgtttttcccctgcgctttcagttgaagaataatctcttccccatgccattgcgtccggcttaacgttgattttgtaccacgtaaacacagttcagccaacataacaaaaggttgaggtgcggtagaaaacatctcatcaatcaatgcttcacgctgttgctccgtcagttccggcatacagtaacacagatttattcttgctctacgacgtgcccctttcgctaacttacccgccaaccagcctattttagccagcagaggatcacgcactttaactggtaggtaagccagcccggccaacacaccaatgcccagccataatccccagtaacgaggatgcaggtaagatttatgaaatgtcggcacataaccagctttactgtctgtatctgtttctttatgcatgagataactctttaaaacaaaacgataatttgccattttcatacagggatctatatcaacagatgtcaacatatcttgttctgcaatacaaaacgacagcggatgatatcaatcatccgctttaaagtctgttactaatgaacaattaaactcaatctaacagaagctggggcgttacctcttttaccattgccaagaattctgtgcgttctttaccactcaaaccgccagaacgcggcaatttcgccgttaatgggtttaccacctgctgattgatccagaattcataatgcaaatgtggaccggtagaacgaccagtgctaccggacaacgcgatacgatcaccgcgttttaccttctgccctgatttcaccaacagctttctcaagtgcatataacgcgtggtatattggcgcccatgacgaatggcaataaagttacctgctgctccgttatatttggagacaatcacctcaccatcacctaccgccaaaacaggcgttcccaccggcatagcaaaatccacccctttatgtggcgcaacccgaccagtgactggattcacacgccgaggattaaattgggaagatacccgaaattgcttggcggttggaaaacgcaaaaatccgcgctccagaccggaaccttgacgatcataaaaacgcccatcttccgcccggatagcataataatctttaccaccactatttaggcgaacaccaagtaattggctctgttcactgtgaccatccaacatttcacgggacagcaatacagagaaacgatcaccttcatgtaatttacgcaaatcaatttgccattgcagtgccttggtaacttcacgtgcttcactgctggttaagccggcatttaaagcactgctggtaaaattactatcaacaacgccaacgacgacgctgtttttccattcccctttctgaaactcttttgtttctttaaacagatcgccctcacgggtataaatgcgcatttcacggcgggaaacaccccaagtcagcgtttgcaagtcacccgcttcattgactgtccatgacaatggctgaccaatattcagcccccgtaacgctttatgctgactcgcgagtaacgcgacatcagaagagtcgataccaaattgggtcagaatattactgagggtgtcaccgtcagagacaatatattcatgcggagtttgagccgtaacctctgagttcgtctcttcatcaggaataccttcatccggtagctgttcactgctatctgcaataatctcatcactatctaccggaagattgatagcgatgctgccgactgttgtttcttcttgttcatgatgataagcaataggttgccacatagtgacaaccaatgttgctacagtcagcgaacccaacataattttatgcggtcgcggtaactccttatacaccagaacgatagttttaactatctgttgcactcattgaattccttattgctttaattcaggcaacccgcgtactgttccgacaactgagttataaatttcatatagctgtccttatccaatacgatgcggcctcctaacggatctaaagtgcccatacgcactcccgtatccttcgccacagcattaataacggtcggcctgaattgtggctcagcaaaaatgcaggttgctttctgctcaaccaattgtgttcgtatatgatgtaatttttgtgcgccaggttgtatttcaggattaatcgtaaaatgtcctaatggcgtcaggccataatgctgctcgaaatagccataagcatcgtgaaaaacaaaataccccttaccacgcaccagcttaagaatattagcaatatttttgtcagtttgcgcaagctgcgcattgaatttacgtaggtttacgtccagcgctgcttttttatgcggataacgcgcttgtaattggtcatgaatcccctgtgccacctgttttgctatttctggtgataaccagatgtgcatattatattcaccatgagaatgatgttcatggtcatcttcatgtttatgctgatccggttcgggtaaatcttcattatttttcagcaataatggcctaatcgttggcaattgtgctaaaactaactgtttattttgtggaactttggctaacggtttagacaaaaagatttccatctcaggtccaacccacacaactaaatctgcccggttaactttcttaagatcagacggtctcaacgcataatcatgcggtgatgccccatcaggtaacagtacctgcgtatcagttacaccctcagttattgccgcggcaataaaacccaatggacggattgatgtcacaacatcagcattaaccgattgtatcgttcccgacatgaaaacagcaataatcgcggtcttgcagagaaatttgtgcgctagtttatatgatttgtgtaacataatgtaaatatctcgtggacagaaaccagaattgttatattataacatctcaatgttcacgcaagatatatttaacatgtcgacactcatcactttaaaaaatgttgctgttaatttcggcgatcgtcgggtattaaacaatatctctcttcatttgcaacgagggaatattctgactttgctaggtcctaatggtgccggtaaatcaactttagtccgcgttgttttagggcttattgagccatcatccggcactattgaacagaccgatggattgaaaatcggctatgttccgcaaaaattgcatcttgatcccaccctgccattgacagttaaacgcttcatgatgctaaaacccggtgtcaaatctggcgatatattgccggcacttgaacgggtaaatgctgctcatctattgcaacagcccatgcaaaaattatccggaggggaaagccaacgggttttattagccagagcactattaaatcaacctcaattacttgtccttgatgaaccaacacaaggggtcgatgttaatggtcaattagcactttatgatttaattaatcaaatcaggaccgaattgcattgtgctgtactgatggtttcccatgatttgcatctggtcatggcgaaaacagacgaagttttatgccttaatcaacatatttgctgttccggcacacctgaagttgtttcaactcaccctgaatttatcgctatgtttggtcatcacggtgctgagcaattagcaatatatcgccatcaacacgatcaccatcaacacaatcaccatcatgatctgaaagggaaaattatcttggaaaataacagggaatgccactcatgatcgaattattattccccggttggttggccggcgtattattggctattgctgccgggccattaggttcatttgttgtctggcgcagaatgtcctattttggtgatactctggctcatgcttcattgctgggcgttgctttcggattattgttaaatattagccctttttacacaattatcgccgtcactttgatactggcaatgatgttggtttggctggagaaacgtcctcaattggcaatcgatactttgttggggattatggctcacagcgcattatcattagggctggtggttgtcagtttaatgtctaatgtgcgagttgatttgatggcttatctatttggtgatttgttatcagtcacctatgaagatatttggttaattgccatcggtgtcaccattgtcaccacgctcctgttctggcgatggaacgccctgctctctatcaccgtcagtcaagaaatggcttttgtggatggcattaaaatacagcggttaagagtgctgttaatgctggtaacagcgttgacaatcggcttggcaatgaaatttgtcggtgcactgattatcacctccctgctcattatcccggccgccactgctcgccgttttgcccgcacaccggagcaaatggccggtattgctattgcggttggcatgcttgccgtcaccggtggattagctttctccgccatttacgacacaccagcaggaccctctgtcgtgctatgtgctgcggtgatgtttattgccagcctgatcagtaaagcaaaaaattaatccactgagtgggtacaacccggttatcaggagaacgggataggcttcccttacgggaatgcccatcccgatttttcaggcaattacatatacccgttatctttcaagttgcctctttgttggctgcactcaccccggtcacatcattacctatgctcccggggattcgctcccttgccgtcgcgatccatcttaaaatccatagggtatagatcattcctgatttctgaccatgccaaaatggcgataagcatgttcagtggcaattcgtccacgggaagtacgttgaataaagccctgttgaatcaaaaagggttccagcacatcctcaatcgtttcccgctcttcaccaatagcagcggcaaggttatctaccccaaccggcccgcccataaatttatcaatgatggcaatcagtaacttacgatccagataatcaaaaccggcagcatctacgctcaacatatccagcgctctggtggcaatattgccatcaatcgcaccattcccttttacttgagcaaaatcacgtacccggcgcagtaaacggtttgtaatccgcggcgttccacgagaacgcatagcaacctgccgggcaccatcgtcagtaatctctactcccataaaacgggcactgcgagaaacgatactttgcaaatcgtccacattataaaattcaaggcgctgcacgataccgaaccgatcacgcagtggcgaagtcaaagaacctgcgcgagtggtagccccaatcagggtaaaaggcggcaaatcaattttgatcgaacgggctgccggcccctcgccaatcataatatccagttggtaatcttccattgctggatagagaatttcttccactaccggcgataaacggtgaatttcatcgataaacaacacatcatgcggctcaagattggtcagcattgccgccagatcgcccgccttttccaacaccggaccagaagttgtgcgaagattaacgcccatctcattggcaacaatattcgccagcgttgttttccccaatcccggcggaccaaaaatcagcaggtgatcaagggcatcaccacgctgtctggcagcctgaataaaaatctccatctgctcacagacttgcggttgcccaacatattcagacaacaatttaggtctgattgcgcggtcaatcgcttcatcgtcttgcaaaacttccgcagaaaccagacggtcagcttcaatcatggcttacccctgtaacttagagaacagcgcgaagtgcttcgcggataagtgtttcacaatcagcacccggtttagcgattttactgaccatgcggctagcctcttgtggcttgtaacccagagagactaatgccgcagcagcttctgcttcgctatcagcgtcagaagttgtctgtttggccgttgccggcaaattaatatcactgctctgattgaagagatcgccattgagccctttaaagcgatctttcatttcaaccaccaaccgttcagcggttttcttacctacacccggcaatttaaccagagaaacgatcgcttctcgttcaatagcagaaacaaattgctgcgcagacatgcccgaaagaatagccaacgccaatttaggccctacaccattcactttaattaattcacggaatagcgcccgctcctgcttatcattaaaaccataaagtaattgcgcatcttcacgcacaacaaagtgagtaaacagaacagcttcctgtccggcatcaggcaattcataaaaacaggtcattggcatatggacttcataaccaacaccatttgtttccagtaaaaccaaaggtggttgtttttccagcacaattcctctgagacgccctatcactcgtttaccccctaaaacctaaaaaataaaactgattgttctatttatggttataacataaaaaaagctggatgcatatccagccgttatcttaaacgtccacgtgccaaaattaatctgggatcaccaacccgcaaaagattctgattaaagtgacaatgggttatcgcaatcgccaatgcatctgccgcatcggattgcgggttagcagacaatttcagcacagaacgcaccatgtgctgaacctgacttttttcagccgccccggttccaacaaccgtttgtttcacctgccgcgcagcatattcaaaaaccggtatagattgattaacagcggcaagaatagccactccccgtgcttgccctaatttcagcgctgaatcggcgttttttgccataaagacttgctcgatagcaaaagcatctggttgaaattgcgtaataatttcaaggatacccgcataaatccgctgtaaccggttaggcagatcatcaacttttgttcggatacaaccactgccaaggtagctcaaatgacgcccctgctgacggatcacaccatagccagtgacgcgggaacccgggtcgatacctaagataatcgccatattctgtttattcgcctttgattatcacctttaataaaggagataaaaacgttagagaaagtgtcctgtaccacagcacactttctctacgctatgtacccgttatccttcaagttgcctctttgttggctgctctcaccccggtcacatcattatctatgctcccggcgattcgctcccttgccgtcgcaatccatcttgaaatccatagggtatacaacccgactgaaattacagcaaagccgcaatttcatcagagatttcaccgttatggtaaacctcttgtacgtcgtctgaatcttccaacatatcaatcaagcgcaataacttaggtgcagtttccgcatccaactctgctttagtggaagggatcattgaaacttctgctgattcagccacaaaacccgctgcatctaacgcatctttcacgtcaccaaaggtttctggtgtggtgtaaacatcaatcgcgccatcatcataggtttctacatcatcagcgccggcttccaacgccgcttccataaccgcatcttcatccagccctggcgcgtaagaaatcactcctttcttggcgaacagataagccaccgagccatcagtacccaaattaccaccggttttagtgaaagcatgacgaacgtcagaaacagtacggttacggttatcactcagacactcaaccatcaccgccgttccccccggaccataaccttcataaatgatggtttccatgttatccgcttcatcgctgccaacaccacgggcgatagcacgattcagagtgtcgcgggtcatgttgttggacagtgctttatcaattgcagcacgcagacgtgggttagatgccggatctccaccacccagacgggctgccgttactagctcccggataattttggtgaaaatcttaccgcgtttcgcatcctgcgcagctttgcggtgcttggtgttggcccatttactatgacctgccataaggttctccgataaaacgtctaataaacttattcaataacaaactcttcaatcgcctgccgattgctccacgacttagtgagctttactgctttatccgcatccagccactgataagcctgatgttcagtcaacaggcattctcgctcttccggcaatgccagacagaaccagtactctttattgcgggtgactcctggagcatagcgatggcgcaaatgggtaaaaatctcataataaagagaacgccggcaatctatcaattcaagattttcacctataatatcaataccgacttcttcttgcacttcacgcaatgctgtctcccacggcgtttcatctccatcaaggctgccagtgacagactgccaaaaatcaggatcgtcccgccgctgtaacattagcacccgtcggctggaaatcgcataaataaccaccagcacagactcggggcgcttataagccattattcactctcttttttagcaacaacagagattgataactcttcaagggacgccggattggcataacttggcgcttccgtcattaaacaagcggcagcggtggttttagggaatgcgataacatcacggatgttatccgttcctgtcagcagcatcaccaaacgatcaagaccaaatgccaaaccggcatggggtggcgtaccaaatttcagtgcatccagcaagaagccaaatttctcctgctgttcctgctcattaatgcccaaaatacggaacaccgcctgttgcatttcattacggtgaatacgcactgaaccaccacccacttcgtaaccgttaatcaccatatcgtaagcattggcaatagccgaaaccggatcttgcgccaactccgccgctgacatattacacggtgaagtaaacggatggtgcatagcggtcaggccaccttccccatcatcttcgaacatggggaagtcgataacccacagtggccgccagctatccaattttgtcaggttcagatcgcgccctaatttcagacgcaacgctcccaaagcatcagtgaccacttttacactgccagcaccaaagaacaaaatatcgccatcctgtgcatcggtacgagaaagcagaccttcaatcacctcggcattcaggaacttggctatcggactttgaaccccttccagaccggcagcacgcgcattgacttttatccacgccagcccttttgcgccataaatcccaacgaatttgccatattcatcaatctgcttacggctcaattcagcaccaccgggtacccgaatgacggctacgcggcctttactgtcattcgccggctcagcaaaaacactaaattccacatctttaaccagatcagcaacatcaaccaactccaacgggttacgcagatcaggtttatcagaaccgaaacgacgcatcacttcagcaaacgtcatcaccgggaaatgccccagatcaacaccgtcaatttcaaaccacaattcgcggatcattttttccatcatttcccttacctgctcagcagtcataaaggaagtttccacgtcgatttgagtaaattctggctggcgatccgcacgcaagtcttcatcacggaagcatttaacaatttgataataacggtcaaaaccggacatcatcagcaattgcttaaataactgcggagattgaggcaaggcataaaatttgcctttatgaacacgacttggcaccaaataatcacgggcaccttcgggtgttgctttcgtcagcatcggcgtttcaatatccaggaaaccctgattatccatgaaacgacgcacaaaactggtgattttagcccgtgttttcaggcgatttgccatttcaggtcgacgcagatcaatatagcgatatttcagacgttgctcttcactgttcgtctgattgctatccaaaggcagaggttcggaacggttgatgatattcaaactttccgcaaaaacctctatttcaccggtagccatatctttattgatttgactgtcaggacgggcgcgtacagtaccggtgatttgaatacagaattcattacgcagttcagcagcctgagaaaatgcggcttgctgatccgggtcaaaaaatacctgaacgatcccttcacgatcacgcatatcaataaaaatcaagccacccagatcacggcggcggtttacccaaccacaaagagtcaccttctggccttcatgggtcagattcaactgcccacaataatcagtacgcatacaatatccttttactcggctgttgtgctgttgctgcggaaattttggcatcgttcttgaacttgaaaagtgtcatgaagtgtcaaaaaaggtcgccattataatggaaattctgctcagagataagggcaggtaatatcccgatgcgataccattgcttgatgtctgataatcaggcaatttattttcaattcccatctatttatagcgacagttttatttttggggtttatcataacttaattggccaatttcggttaggcaatggagttaaaaatggttagctcgctttatgttgtgttgggcgcactattattgattaagctgtcttttgatgtggttaagttaagaacacaatatcgtgtctcatatggagatggtggtttttacgaattacaaacagcgatccgcattcacggtaatgctgtggaatatatccctatctctatgttattgctggtcatgatggagatgaacggctcaaatgtctggatgatacatgtctgtggtttgattctgcttaccggcagagtcttgcattattatggcctgtaccaccgtgagttctactggcggcgttcaggcatggtagcaacctatctttcaatcgtattaatggtgataacaaatatttactacttgccttgggaacagatattttctctctactaacctaatagtactggcgctgaaataacaggcagcaaactcggctgcctgttattctaaccctagctgttcactatgtaaggaagactttccgacgttgacatgcaaagcgagcaagtgttggtttttttacctctcattggcgagggtataaaccgcatctccgacccgtttaccacgtttaccaatagcaattaccagcaagataatcttattgtcattcacttcataaaccaagcggttgccagaagaccgcaatttaattttgtatcggttcgatcgcccacttaatcttgctgacggcacatgagggttttctaagcgttcagccaattttctctttagctgctccttaattggatgacctaacttcttccactcttttaaggcccgcttttcaaattgcagactatagatcatccaggttcacactaacaaattcagcattttctaaacgttcatctgcaattttgtttagtgcggcatcctctgctagctcctgatagtaggcgaataattcaggaggcacacaataaaatgcaggttcattccgattcaggattgcgaccgcttcaccttccccctgcaaatatgtccccattgggttacgtttcaaatcggtaatacttgccgctaaatttgttaagatttgatatgccatacaccacctcactcttttacgtaagcaaacaataggtcatttaaaggtgctttacaatgcatctttacttttatatcaaacccaaagatcccctaatgctgactaatgaaatcaaggattgatcgcgtcatgatatgatttttgtgcaacacttaacctcctcaaatatttccattattcactacttttaagcacagagaaaattggttcaaggtcaagctttacatctgttagaatgccaccttctattttttctaataattaatgctgttatgtcaaatcaagatcctcaccatcaaagggatagcctgtttgctacgcctattgccaatctgggagactggcgtttcgatgaacgggtagccgaagttttccctgatatgatccaacgctccgtgccaggttattcaaatattgtttccatgattggtatgctggccggccgtttcgtgacatcaaacagtcaaatttatgatatgggttgttctctgggcgcatcaaccctggcaatgcgccgcaatattgtcgctgaaaactgcaaaattattgccgttgataattccccggcaatggtggaacgctgtcgtcgccatattgatgctttccggtcgcaaacaccggttgaagtcattgaagccgatattcttaatatcgatattcaaaatgcttcgatggtcgtactgaatttcaccttacaattcctcaacccgcaagatcgacaaggtttactaaaccggatttaccaaggattacgccccggtggtgttttagttttatcagagaaattcagctttgaagatcaacagattggtgagttactgtttaatatgcaccacgattttaagcgtgctaacggatatagcgaactggaaatcagccagaaacgcagcatgcttgaaaatgtcatgttgactgattctgtagaaacacacaaatcccgtctccatcaatccggttttaaccatgttgaagtctggtttcagtgtttcaactttggttcactgctggcgataaaaggagccgatgaatgatcgatttcggtaatttttatcaacttattgcaaaaaataacctccagcattggcttaattgccttcctgctcaactgcaagagtggcaaaaagcagccctgcacggtaattttaaatcatgggtaaaaaccctggaaaacctacccgaaatttcaccgactcaattagacttgaaaaatggcgtgatcgcagaacgcgatccgcccctatccgcaggtgaaaaaatttgccttaccaatatattgcgaatattcatgccgtggcgcaaaggcccattctcgctttatggtataaatattgatactgaatggcgttcagattggaagtgggatcgagtactgccccatatttctccattaaccggccggacaattcttgatgttggctgtggcagtggctatcacctgtggcggatggtcggtgaaggggctgaacttgccgttggtatcgatccaactcagctcttcctctgccaatttgaagctgtcagaaagttacttggcaatgatcaacgcgcccatcttttacctctgggcattgaacaattaccggcactggccgctttcgatacagtcttttcaatgggagttctctatcaccgccgctctcctcttgaccatctctggcaattgaaaaaccagcttatatccgatggtgaactgatattggaaagtctggttgttgaaggagatgaacatacctgtttaatcccaggtgaacgttatgctcaaatgcgcaacgtctacttcattccttcggcaaaaatggtgaaaatctggctagagaagtgcggttttgtcgatgtgaaaattgtcgatcaggcagtcacagccacggaagaacaacgtcgtacagattggatgaaaactgaatcactatctgatttcctcgatcctacagatagcaataaaaccattgagggttatcccgcccctctacgggcgatactgatcgcccgtaagccctaatttttcgaactggcccaacgttgggccagttcatataccctatggatttcaagatggatcgcgacggcaagggaacgaatccccgggagcatagcgaactatgtgaccggggtgaaggagtgcagccaacaaagaggcaacttgaaagataacgggtaaaacgagtaaatagattttattcaaataaagtcaaactcagcatccctttcatcacctctaccacaccaccatcaacacaataatgtgaaaactcatccacctcattgtccgcgctcatcgtcactcccgctttacgataggtcatggtagaaagcataatccggcttgccgaactgtgaacttccgttaacccgatatcgataaatttatgaatattactcatacgaacaccagcacctgccataataattggcccctgactggcttgatgcagctctttcaataagggtaatcctaattcggcattctgttgctggccggaagtcaatattcgtttaacaccaagttgagtgagttgatccaatgccacataaggattaaaacacatatcaaatgcacggtgaaaagtgacggccatatcgccagacagtgccatcaattgttgcatacggggcaaatcaatatgcccttcttcatctaatacaccaaaaacgacgcccataaatcccatatcacggatctgagccacatcatttttcatcacctcaaaatctgagtgactgtagcaaaaatcaccacctcttggacgtacaatgggatatacaggaatagttaattgctcaatagcctgcttcaatgtaccaaaacttggtgttaatcccccttccgccggactggcgcagagctctatccggtcagcacccgcctgttgtgcgattaatgcgcaacctacgctaaaacaacaaatttctaactttgtcatcagaagttccttggacacccagttattaacgagcaattaatgaatctaagcgattcagtaattcaacccactaactatgacatctaattattgccgatgatttgtaggaaatcacaaggtcagaacttttatctggatcacaaggatgaaaaagttaattttgctgactggtgctcacttttaacaatttcacgcaatgtaaatgggtgaaacttgacggagatctcaccatcagtgatagctaaggtcggattaggcaaccgctcttgttcccctttgggttgactctctttaactatccccaacttgggtgtaatattatactcaagttggggacagatggataaatgatggaagctgtttttattgaactaccaccttttgaacgttaccgtcataactacctgagtgatgaggagtttcgaaccttccaaaatatgctactgaaaaatccaacaacaggagatgtaatccaacatacaggcggattgcgtaaagtacgttttactgattcccgaaggaaaaagggaaaacgaggcggtattcggataatttactattggtgggtatctaaatcgcaattcatgcttttcactatctatgataaagatgaaatgtcagacttaactaaagagcaatgcgaatccttgcgtaaaatgttagaaatgagaaaaaaaggagcataaatgaagcgtgatctatttgcagaactcaatgaagggatgaaagcttgggaagaggctaacgaaggcaaactcacattgaaaactcataagaggaggttaaaaaatgatatcttcatcagtccggatgagttgaaatctatccggagtaaactgaatatttctcaggctgtttttgcccagtacctgcataccggtgagacgacataccaaaactgggaacagggacgggctaaaccgaataaacaagctgtgttactgattaaaatggtggagcgcaacccgcaggcactagaatttcttgccagcctcacataacaatatcactttaattcatgtagctgagcattcacttttaacaatttcacgcaatgtaaatgggtgaaacttgacggtgatctcaccatcagtgatagctaaggtcggattaggcaaccgctcttgttcccctttgggttgactctctttaacagaaaaacctgccggcaaaggttgcggtaataatgcttttgcggctgttgataagatctcaggtgccaccggcagcaccagctccacatgttcccatccctgatgcaagtaagttttcttgccaggatagggcaattctacacaatcaatttgccaattaagcaccgcaattgggtactctaaatcaaacaagcagattggacgtccattaatgatagtttctgacatcaaactgccacattgcaaaaaacctttacgccagcgctccgctacagagatatcgtgacaacgtaaggagatatgatcggcttgatattgctcaacattcaaattaagccgttgtttgaaccgtaccaatttttgctcaaatattgccagttcagccactaaatcctgtaattcaacaatagaagaaaaatgtgtcatattatcccagttaagatgcaatagattggtcccttccctggccccaaacagcccaagaattttaaagggttgccgccgtttcaaacctcaaatgatactctcgattggtaataattgaaattcgatggtaccaacacaatcactctttcaataattccatgaattctcattaccctatttcacccacaaaaaactgcaattaagagcctatctcaataggcgtaattgttgcagaccattcttatcaatgaacagtgaacacggacagcgcggaaaaaccggagcgtacacgtagtacgtgaggattttgagcactgcccaggttcgctctttatggcaaagaaaggcaaataaaatagctctattgggataggcagtaagcgaaaaaatccgcttgggacaatgtttgataccttgcaagaaacactatctatcaataagttactatacctgttatctttcaagttgcctctttgttggctgcactctctcaccccggtcacatcgttatctatgctcccggggattcgctcccttgccgtcgcgatccatcttgaaatccattgggtatataaccattttattttacacaatttccgcacgtaatgggaattaagggtaattaagggtaattctggttttataatataattagattaggaaattaaaaataggaatattattcttttattctaacgattcaggacaattatttaaaataaaaaataatcacaaagtttatcattcaatataaaattaagaatctataaaaaaaacaaaaataaaaagcaaaaattacaatattaaaattaaccatcgatataaagattattgtaattgatacagatcacaaacactaattttctcattgaaatccaatcataaagaaaataaattacattttagtcaaatatgtaaatatctttgacaaaactatttctataaaacgtaatttcggaggtaatactatgtctgattggtcaggaagtgttccagctaacgctgaaaatggtaaatccacaggacttattctcaaacagggagatacaatctctgttgttgctcatggatgggtgaaatatggccgtgataatgttgaatgggcagcacctgatggtcctgtacccaataatccacaaccgtcatcaatagccactctcgtcgctaagatcgccaacaagaagtttgcaattggcaacggagtacttcataaaacggttcctgtagatggcgaattaatacttttattcaatgacgtaccgggtacttttggtgataattcaggtgaatttcaagtcgaggtcataatagagtctcgatactcccctttaaaataaataaaaactgtgtgaatatatattaccaataaagtaataaacatttttattgatataatgccaagtgaaaaatcacactatttcacttggcagatgtcatcccacaattctctgtccttattattcggttaatgcagttgcaataagatcttatctacccaaaaaccacatacaatcaattacattaaagctgtatataaaaacagtatcatccatgacatcaactgaaaagaaagttttgcctatcaacaaaacaggccacgcaatgcgcagcccttaataaattacactaccgaactaagtcatcagcgtattacttttcccggacaccttcgatagaaatcaataaatctgcttcctgtgatttaggtcccaaatctgctttgaaattaaagtctttcagtttgattttaccagaagcttcaaaacctgcgcgataaccaccccacgggtctttaccttcacccatcagctctgcattcagtatcaccggctttgtcacaccgtttaaagtcagatcacccgtaacaacatatttctcgccctcttttttcacttcagttgacgtgaattttgcttcagggtatttctctgtattaaagtaatctttactacgcaggtgtttatcacgttcggcgtggttagtgtccaaactggctattttgatcgtcacattaactttattttccgccggattttgctcatcaaatgtgaaagaaccatcaaaatctttaaatgtcccatatagccagctataccccaaatgctgaatgcgaaatccaataaaggcatgctggccgggtatatcaattttataattggcagctaatgcagaacttgcatttagtaacaatgcacccgcagtcaggccaagtagcgtcttcttcaacatattcttctccataatcgtcttttatattattcaggacggaaacccagtatccgctttaaggttgcatcacgatcaataaaatggtgttttaatgctgcaacagcatgtaataacgataaaattaccactgcccaagcaaggtaaagatgaatcattccagcagtatccgcctgttcaccctgaccgattaatgtagctggcacaataaaccagtcaaaaacagaaattggctgaccatcagcggtcgaaattaaataaccactaatcaaaatgccaaacagtaagatatacaacaaaatatgcattaaaaccgcgctgactctaatcaggcgactataactggctaatggcttgggtggtggagaaacaaaacgccagataacacgcacagccatcatgataaacagcaacatcccgatacttttatgaatttcaggtgctttatgataccacgtatcgtaataccctaatgtcaccatccacagtcctagcgcaaacatgccatatacgatcaatgcaaccagccaatgtaaaaggacagataagtgaccaaactggttggaagtattcttccaaagcataacagttccttttttaggtaaatgtagactagccattttttgaactaattcaattatgaatgatattaatctcttttttattaaaaatcccaacaaataatttgcaaaagattttcaattttaatcaataaaactcatttaaggtaaaaaaaacattaagtaacaataagataaaaataaatcacattaataataatgtcgaaaaaatatataatatatatttttttattatatttgactttaaatttcaactaccgtaaaaatcaattatcttattttctattatttctttataattttccgcctataagaatcgtaacctgatgcactcgtatctggcgagtctaacacaagcctggaacaataaaagggtatatacccgtcatctttcaagttgcctctttgttggctacactcgctcaccccggtcacatagtttgctatgctctcggggattcactcccttgccgtcgcgatccatcttgaaatccatagggtataaaacatgaggaacatcactgtttacggcagcaaatcttacagcattaatcatacaatagtggtaaaaataacatcaataaattatcaaaaatgaggttttttatgtcaaatagcattttacaagcactcacggtgttgaagtcaaaaaaatgggtcgatttgacgcatagcttcgataaagattctccacatttttttatgcttgattcagcagaatttaaaacactgtttgattataaggatggcttttttactcagcaattttcttttcccggccaatatgggactcacattgatgctccctgccactttgttcctgatacccgttatgtcgatgaattggaattaaaagaattagttttacctctaatcgtacttgatcaatcagaaagagcaaaacaggaccctaatttttcactttctaaagaagatattcttaaatttgaagaagaatatggaattattgaggcaggtactttcgttgcgctcagaacggattggagtaaacgctggtcatctcagaaagcaatggataataaagatgattctggcaataaccaaacacccggttgggggatagatgccctcaagtttttatttgaagaacgccatattaaagccattgggcatgaaacatttgataccgacgccgctaaagattttagaaagaataatgccttgttaggcgaagattatgtcttaaagcaagatacttatcagatagaacttttagctaatttggaccaagtacctgtacgtggcgccgttattttcaacattgtagccaaacctaaaaaagcctctggttttcctgttcgtgcgtttgccatactcccataactgcgcccctcccttatgccgtatattcattacggcattatatacccgttatctttcaagctgcctctttgttggccgcactcgctcaccccggtcacatagttacctatgctcccggggattctctcccttgccgtcgcgatccatcttgaaatccatagggtatagttaccatcatgattttgcgggaagacgcgttttttatcttcgccacttggcacaaagcaacagtaaagtggtatgtcatgtgttgaatatggtataaaacccgccgttttttcttatgaaccattttgcaaaggatattgtttgctacaatatacctatttcttgttcgtcatttaaggtaaccaggtgaatattcaggcgattctttcagaaaaagtcagccaagcgctgattgcagcaggtgctccagccgacagcgaagctcacatccgccaatccgcgaaagcgcaatttggcgactatcaggccaatggtgttatggccgccgcgaaaaaagtgggtatgcctccccgacaactggcagaaaaagttgttaacctgctaaatctgcaaggtatcgccagtaaagttgaaatcgctggtcccggctttatcaatatcttccttgataaagcatggattgcagccaatatcgaaactgcactgaaagatgaaaaactaggcgttacgccagccaaaccacaaactattgttgtcgattattccgcccccaatgtcgcgaaacagatgcacgttggtcatttgcgctccacgattattggtgatgccgccgtccgtacattggaattcctcggtcataaggttatccgcgctaaccatgtgggtgactggggaacccagttcggtatgctaattgcctatttggaaaaagtgcaaaatgaaaatgccagcgatatggcattgtccgatctggaagcgttctatcgcgaagcgaaaaagcattacgatgaagatgaagagtttgccatccgcgcccgtggctatgtggtgaaactgcaaggcggtgatgaatattgccgcaccatgtggcgcaagctagtggatatcacgatggcccaaaatcagcaaacctatgatcgtctgaatgtcacgctgactaaagattctgtcatgggtgaaagtctgtacaacgatctgctgcccagtattgtcgcggatctgaaacagcaagggctggcagtagaaagcgatggtgcaaccgtagtttaccttgatgaatataaaaacaaagaaggtgaaccgatgggcgttattatccaaaaacaggatggaggttatctttacaccacaaccgatatcgcctgtgcaaaataccgttatgaaaccctgcacgcggaccgcattctttactacatcgattcccgtcaacatcaacatttgatgcaagcctggaccatcgttcgtaaagcgggttatgtaccagaatccgtgtcactggaacaccatatgttcggcatgatgttgggcaaagatagcaaaccatttaaaactcgcgccggcggtactgtcagattgaccgatctattggatgaagctattgaacgtgccaacacccttatccgtgaaaagaacccggatatgccagaagatgaattgaaaaaagtggtttctgctgtcggtatcggtgccgtgaaatacgctgatctctccaagagccgtaccacagattacatcttcgattgggataatatgctcgcttttgaaggcaataccgcaccttatatgcaatatgcttacacccgtgttgcctccatctttaaacgtgccgaaatcgatgaaagcagtctgaccctaccggttatcctaaatgaagatcgtgaacaaacattggccacccgtttattacaatttgaagagaccatcaccaccgtcgcccgtgaaggtacgccacatgtgatgtgtgcttacctgtacgatttggctggtctattctcctgtttctatgaacactgccaaattcttaatgcggaaagtgaagagttgcgtcaaagccgcctaaagctggcgctcctgactgctaagacattgaagcaaggtctgaatacattgggtattgagacggtagaacggatgtaacaggataatcgttgtttttctgaaaaattggcgtgattgggaatatctattattgccttatcacgcctgtcacaataggcaccgccacgcttcatcatccccaacgcgaccgccactcgctgagcgaatcccggttgttgcaattaatgtccatatatacccgtcatctttcaagttgcctccttgttggctacacccactcaccccgtcacatcgttatctatgctcccggggattcgctcccttgccgtcgcgatgcttcttgaaatctataaggtatagacttattagctgatatcccggtaacctcagaaaactcaagctcagcttgagctaacaataactaccgggatacctcaatttattaaaaactgcggtgggcaaaatcttttagccgaaaacccatcagcaccaacgcagcaaaatagctgcttgccccagcgataacaaccaccatcaatcgcaacaggcgcgtagccatatttccctgctcccatgctggcatcaaccataaagtaacagctaatacggcaatcattaccgtaattgccacaaccagtttaaataagaacctcccccaacccgctaacggcttaaaaatatttttcttacgtaattgccagtaaagcagactagcattgaaacaagatgccagaccaatagacaaggctaacccagcatgtttcagcgggccaacaaaggcaaggttcattaactgagtcaaaatcaaagtgacaatcgcaattttcaccggcgttttaatatctcgacgagaataaaaacccggtgccagtaccttaacaataattagccccatcagtccaaaacagtaagcaatcaacgctttttgagtcattactgcatcaaatgccgtaaaattaccgtattggaatagagaaactgttaaaggttctgccagcatacctaaagcaacagcacaaggcagcgctaataaaaaacagagccgcagcccccaatccattaatttggtgtactcctcatgatttccactggaaaaacttttcgctaatgaaggtaaaagaattgttccaagcgcaacacccaatacaccagagggtaattccatcaaacggtcagcgtaatacatccaggagacagaaccggacaccagaaatgaggcgaaaatcgtattaataattaatgaaatctggccgactgaaaccccaagaattgcaggccccatctgccgcataacccgccatacgccgctgtcacgaaaagaaatacgcggtaataccagcatgccaatcttttttaaatgaggaagctgatataagagctgtaaaatccctcctgcaaccaccgcccaacccaatgccatcaccggcggattacaataaggggcgacaaataatgcaaacacaatcatgctgatattaagtaatgttggagcgaaggcaggaacagaaaatcgattccaggtatttaatatcgcacctgccaacgaggccagtgatatcagaaaaatatagggaaaagtaattcttaacaaatttgttgtcagcgtaaatttatcggcggtatcggtaaaaccgggtgcggtaacataaatcacccacggtgctgccaaaactcccagtacagtaacaatggccagaattaacgtcagcataccggaaacataagcaataaacgtccgagtcgcttcatcaccttgctgattcttatattccgccaaaatgggcacaaatgcctgagaaaaggcaccttctgcaaaaatacggcgcagtaaattaggcagtttaaatgcaacaaaaaaagcatccgctgcaacaccagccccaaatatgcgggcaataatggcatctcggataaagcctaaaacccgagagaacatggtcatagagctaaccgcagccagcgatttcaataaattcatcgtatttatctcaaaatcatgttagttaatttccgaactgcctgtacgtcagtgcaaaaatggaaaatggattatacccgttatccttcaagttgcctctttgttggctacactcgctcaccccggtcacatcgttacctatgctcccggggactctctcccttgccgtcgcgatgcatcttgaaatccatagggtatatacacgactgagatacttgtgaactgtcggtactttttaagttgcctgtattagggcaaaaaaccaccaaatcacaccctcttaatccagcttgctaagctatcttttaaaatcaataaattattatttaatataaaatcatgtacgaactcaagttatatgaatatttattttcactcactctttatttatctattttttctattcaattactattatcccaaaaatataaaatcaaagttagcatttatcaaataattatgaaacggaatttcagcacttattaaataaaccaattagaataacacctatttttatgtaactaagaaaccattaaaattattttcatgataaatgaattactcggaaatatttatttacagagtagcgatattgtacttattatatgaatctaccatggttaatcattcactttgttaacaaaatcggcgagtatgcataaattcattctcatacactagaaatcattaacttttataatttgccaatgtaacattgtatttggcctaaatgatggtaccttgcaactagccttactacagaaagcccaaatagccacttcgaaaaacgcaccaaccgaagtcagtgcgtcaaataaatcaactcattgaagcttactcatttctaagctgcctgtacggcagtgaacgagatgagattatagccaccgggtttacttgctttctaagctgcctgtacggcagtgaactatcggcccggcaacacttagcccttcaaaagtttctaagctgcctgtacggcagtgaactgttgatgtattcattttgatcccctttaatatttctaagctgcctgtacggcagtgaacccagctactacgttgttcttaagaataaacaatttctaagctgcctgtacggcagtgaactgggaatacttgtctttggtatcgttcttacatttctaagctgcctgtacggcagtgaactgttacatattaactttaagctactgacaattaaagcatatattgataaaacaatgaaaaaacccttttttacaagagaaataatatcccattaaaaatcaatagattaaaatccactctcaaaaaagggtcaaaaataaggggtggagaaggcagattttcaacagtgatttaattcatcattaccaatttgctttactttatttggtgacagtacagcgtaataatcaactttttccactccatttttcatctgtcaatgcggttaatacgtgatcctgccaaactccattaatcatcaggtatttcttagcatagccttcacgttcaaaacccaatcgttccaacaacttcccactacgatgattatccggcatataattagccataatccgatgcatcccctgttggcgttgcatataacggatagctggttgtaaagcttcgtacatcatcccttttccctgccacttttcaccaagcgaatatcccaaataacaggcatgaaaagccccacgcagaatattactgaaattggcaacaccaataacttcactctcatttgaatcaagcagcagaaaatgaaaagccgcactctgtctttgcatttctatgattaaattcaatcgatttatccaaccggaaggctggcaatgacttctatctctagtcggctcccaaggtttaagaaactcgtgattttctgaatagtactcagccaaacgataagcatcccgctcgtacaccaaacgcaccaccattcgttccgtaatcagacgaactttcggtaaagtggaacgataaccaaacattatttctccctagctctgttaatttatccgttaaaaatttaagtgatttatctgtaaaaaacagcttccactcattactttacgacaaaaaaatattatccataattcactatcctaatgttcgaattaagtacagaatataaaagaactgtattgtcctctcttcttaattactccaatggtgagcaatgtcactggtttcacaagcacgtagcctgggtaagtacttcctgttattcgataacttgctggtcgttctaggtttcttcgtcgtttttcctttaatatcaatacattttgttgagcaactgggttgggccgcgctggttgtcggttttgcgcttggtttacgtcagtttgtacaacaaggtttaggcatttttggtggcgcaattgcagaccgttttggcgcgaagccgatgatcgtcaccggcatgctgttacgcgcccttggttttgctttcatcgccttagccaccgaaccgtggatactgtggcttgcctgtatattatccgcactgggaggtaccttatttgatcctccccggactgcactggtcatcaaactaacccgaccgcacgaacgtggccgtttcttctcgctgctgttaatgcaggacagtgccggtgcggttatcggcgcactgattggtagctggctgctgcaatatgatttccaatttgtctgctggacaggtgccggtgtttttgttctggcagccatctggaatgcattattcctccctgcctaccggatttctactactcgaactcccatctgggaagggatggagcgcgttattaaagatcgtcgcttcttcacctatgtattgacgttaaccggctattttatgctgtctgtccaagtgatgttaatgttcccaattatcgtcaacgaaatcgccggcacacccgctgcggtaaaatggatgtacgcaattgaagcaaccctatcactcactttgctgtatccaatcgcccgttggagcgaaaaacgattccggctagaacagcgtctaatggccgggcttttcctgatgagcctgagtatgttcccagtcggtttgattggtgaaataaataccttatttggccttatttgcctgttctatctcggcaccgttaccgctgaacctgcccgtgagacattaagtgcttcactcgctgatccacgtgcgcgtgggagttatatgggattcagccgtcttggtctggcattgggtggtgccttgggttataccggcggtggttggttatatgataccggccatgcgctgaatattccgcaattgccttggtttctgcttgggattattggcttgataacgctgtatgccctgcaccgtcaatttaaccaacgtaagattgaatctgccatgctgagtggcaattaatgaggtaaaatctgccctccaaaataaaggagtcgatatgagaaaatttttcttgggggcagtattgctgctagtggggttaatcagtggttgtgatcagttcaaagatatcagtatcagcgaagagttaattaatggttatctagcaaagcacgtccattaccagaaacagctcgaattacatggtattgccaatgcggatattgaattgacagaactctccagccaaattggtcgaacagaaccaaataaaatagcattaactggccgtgcaaatgtcaatgttacatccttgcttggcccggctaaagccgatatgaaactcagcctgaaagcacaacctgtttttgatcaggaaaaaggggctatttttctgaaagagttggaaatcgttgattaccaaatcacaccggaaaaaatggaaaaaccgattaacgcattagttccttatctgaataaatcactcagcgctttctttgatattcatcctatttatgtaataaaagcagatcatagtaaagctgaagccgcagctaaaacattagcaaaaaggttagaagtgaagcctggcaaattagttattatgctgaccgataaataatcttcatcaagatatataccctatggatttcaagatacatcgcgacggcaagggagcgaatccccgggagcatagataacgatgtgaccggggtgagtgagtgcagccaacaaagaagcaacttgaaagatgacggatatagcaaaaaggcaaataattcgaagttatttgcctttttatcatttaaacattaagaatccagttcttctcttaacgcctgtaacgcttcacgggtaatcattgctaatgttcggtagaaactggttattgcatgggcttccactttccccaaaaattgcccacaccacggcagcaaatattcatcaaacagcataatttgcccctgaacctcatcttctgctgcctgatcttccagccatgaagcccctaataacagagaaccaaactgatcgacaggcccatcggacaatggcatgcctcgttcaatcaaaaattgacgaatatcgttttcactctccccggtatagtcagaacggcggctcggtacgctagcattatctccataaaacagtgccatataatcagcttgcattgcggatagatcgcagttttgttgcaaacgatccaacaatgcatcttgctccaatggccatgattgcttcaatttaccttcgacaatcaccgtcagaagtggtttcagaatcgggtcttgcggttgacgattaaataaagtccctaaaatacggcagactattgaaaattcattcatctcagtttccaaataaatagcaattttgccgttattgtctccaatagctgcccctactgtaaagagacgttattaatatcctagttttatatccacaacgccggttgataattctcctttttcaattcgtcgaatattttcactaatcgtatccatagcaatatcaggaatagtaatagccgcaacatgtggcgtcaccgttatacgggggtgagtccagaacgggtgcatctctggtagtggttcctcaacaaacacatccaatgaagccccgacgatataacctttatcaatcgccaccaacagatcatgttctactaaatgggcacctcgcgcgatattaatcagatatgactttggttttagctggctaaacagcgataaattcagaataccacgggtttttggtgtatcgggcagcaaattgataagcaccttactgccggagagaaaatcgcccaattgatcttcaccgtgaaagctaactacgttattaatctgttttggagtgcggctccaacaacgcacaataaagccccattcaactaacgtctgtgcaacacggcgacccagaacaccggcacccaacacacccacaacaaaatctttgcgatcataaggttcgagttgtttccacctcctctgcccttgttgcagcttatactcatccatgcgccgcaaataatgtaaaaccattgctaccgcatactcctgcatttgcagccccatacctgcatcttcaagccgcatcagtggcacaccggcgggtaacatccctggtttttgctgttcctgctttaaaatcgcctctacacctgctcctaaaataaaaatccccttcaatccagagcgatttgccaacatctcataggggggagcccaaaccattgcataatccgcatgcttattatcgccgcgtttccattggcggatattgatattgggtaatcgttgctgcataccttgaatccactgagcagcatcaaaaaaggggtggtaaaagataatctccatgactatttatcctcatcatcttacattttcatatagggttatctgatgattgagtataggttgcaagaccctttgttaatcatcattacgaaaattttgagaatgttaagtagttaacgaattcatttttttcttatcaaaagacttgtacattttctatttcagcgacaccagatggatatcaattcaccgaattgactcttatttagctaaccaatcaaaaaaccaaagaaaaatatcagaagagtgttgacgcttgtaacgcttttccctatagtagcgccccgttgcagcgacgatgttagacaaagttactggaatgaaaaaaatggtgaggtgtccgagaggctgaaggagcacgcctggaaagtgtgtatacgtgaaaacgtatcgagggttcgaatccctccctcaccgccagaattgaagagaagctcaggttaaatacctgggctttttacttatatatacctccgatgcagggagggtcgagaaccctcgaacagggttcgacaaaacggcttgccgttttggaccgccaacggcggcccgcagggtgagcgcagcgaatccatccctccctcaccgccaaattcgaaagaaagctcaggttaaatacctgggcttttttcttatatggacattacaattaccatttcaggaaattggcgtgtgacattcgaatttatcgatagtgatgcgtacatcgttaactacgaggattatcactaatgaaaatgtttaacccacctcacccaggcgaaattattgctgactctttggaagaactaggtttaggaattcgtgatctagcgcgagcactaaatgttgctccatctacggctcaacgtttagtgtcgtgcaaagcagcagttacaccagagatggcaataaaactgtcaaaagtacttggtagctctccacggctgtggctaaaactgcaagaaacttatagcctcgataaagcagaaaagacggttgatatttccaaactgactccgttatttaagcctgtccatttatctcacacctaaaagtcaacaacctgagctcaggttaccacctgggctttttactttcataacaccaaaacggcaatatatttacctcgaaagccttggacaaaagatgtcaactatcaaatgttgggactaaacagatataaaaaaccacccgaaggtggctattgccgtttcaaacatcttcatccagtttttcacgatctaattccagtaattcttggaattcctttaatccccttaattcctggattttattctctaaatcggggatcgtatgaacatctggactcgtataaatcagtcgactggtttctatgccttctttgccacacattatatgtatatcaactaataccgtattattatcataacctatagacatagttccattgtattttagcgcattttcaaattcttcttgtgatggatacgatgattcatctccgtactttttcgttaacgatttgcttactggcttcacgaggcggccaatattaatctctaatcttttaaattttccatttaaaaaaaatgccattgcttcacgctttttgttagcaaacgaaaagtcagaacatgaataaagtgatacttcttctatttgagaatttccctcaaatttttcaaaatcacataatcttttcgaaagaaattcttcttctgtcatgccaaactttgcatctttatacccatcaactgccattgcaccaaagctaatcattcccaatgcaagcataactgctaattttttcatattatctccttttgctttgagcaatataacaatgaaaatagtgttaagccaacccccacaaacctctatcaagtccccaaatgcagatgttttggagaattttttcgctatgctcccgggaattcactcccttgccatcgcgatgcatcttaaaatccatagagtatatcaactattaaatgcttggtttaagcttaaagcacaccctttctgtgccctcgtattgacgcgacgtaaaatctcaacaagtacaccaggatattgaccatattctctgctcattatcccgacatcatcggtaacaataaatgccggataactcgttgatgacgcatccatataactcatcaaacccggcattccatcaggtacaggtttcaatgtttcaggatcaagtgctcgcgcatatacccacggcggaacacgtttacgttgcatttcatcctcaaagaaacaagtgttgagttcaacttgattaaatatatcgcggatttgactaatattattgaggttgaacgtgtcgaataaaagatgattgaaatcatcgcgttttagggactctttttcataacttttccagccgccccccgttatgatataaaggtttttatccccataaaatgagatatttttatctttcatatactggcagagcaaataaataaagtatggtgagccgataagacaaatatcttttccttgattttttattcgctcaaggctattcaatgtcttaacaaaatctattcgttcttccattacggtaaatgtcgtgggatataataattctaccaagctcataacatatttaaaccaaatgttatgagcattaaatctatctggccctaagttgaccaactctatttgatgatcaaaccaactaccaacatatttcatgccataactcacagagcctaagagtctctcaatacttagtctgttacgcgccacctgactttttaaaccactcgtgccgctgctggtaaaccaactttcaatctcgttctcctgagaagttaataagcgagtaaacttaaaaactgatgttgggaatacaggtatgtcatcaatttccgtaatattgtcgtctactttgtgtacctgacagtagtgacggtattcttgacaatgtttatagtgattacgaaatgcatcaagaacaaatttgtttctgattttttcctgttcatcgtaagaccaagctaatggatcgctggaaaaaatcaaatcatcaatttctgagcttgctatgatctcttgtttatcaacatatgaagtcatacctgttttacccctccaaataatttagagaatatggcagcgttgctgccatattcttttactacatgtggtactttttaatattatcattaacaatattgattacgtttttttggtgcatcaagtcattcattggttcaaaagataacaatacactttttgcaccgcacttttcaattgccagcttagccgcagctatacattccgtataatctccgacagcgttttctgtgattatctcttcaagtttattttcgagattttcattaggatacatttcaagaacataatcacggataaatgcacgcgtctcttgtttagctttgtgactatcttcgttatagttaaccaataccattaactgatgatctatcgctgataagtcaataccatatttatcagcaacggctttatacctttcagcatattcatatctaacatcattggagtcatcccacttaaagatgagaggaatgccttttttagccgcccactcaacaatatgatgactggttgctgtgacatatctccgaggcccgccttgggtataagcgtgggggtttaccgatattttagggaaactataaaaatcattatcgggattacaatagcctgttgttaaagcatcgttaatgatttcataacactcttcaaatagttgctgttgatattcaacagggcgattaaaaagacgcatttcatcttttttttcacaatcactaaaccctaaaataaatctcccttcgcttaattgatccaataagcaagcctcctccgctattcggacaggatgatgagttgtaatgatgtgattcaatgagccaattttaattttttctgttaaaccgagcaaaaaaccagaaacagtcagaggagcaccgacaacaccattacctgaaaaatgattttcatacaccaaaatctgttcaaaattcaacttatcaacatactctgttatttcctgcatgcgaactatactttgttcttgaacagttgttgaattgatgaagttaaggaagaacaatccaaatttcatttctttttccttagctactataatagcgaacgttgtttttctttaagaaacggcatgacatcagactggaagagcttcatggaagcaataatttcgtctactgttccattcgcttcaaacccacaacagatatttgatattcccgtggcatcaatgtctttttgaattatgtcaatgcattcctgcggggttcccacgggattgatttcgtaactgtaatcaatgcggcgattagtatctctatgtccctttaatacaaagtcacgccactgccctttattgaaatcataacctcttgttttgtctgaatcatcaaaaatggtcgtggcattcacataagaatcataccaatgccctagaaaatcccgacaaatctcttgcgctttatttgagtcataatttacagatgttatatatgataagcaatggtcgatattatgaatatcgtgcccatattcttgagccacctcgttataaagctcaagctgtgctttcttttcgttagtatttataatccaacttaatatcatcggtaaaccaaattgagcggcccattcagttgtcgaggctgattcagcaaccacataaacaggggctccacctttactatatgctgtcgggtttacttttaccttatggaacttgatatgttcattatcagcttccatatatccctctgtcatgccattttttatcaacccgtaccagcactccgttaaagcgcgactgttattcatatccgtgccaaatacgcgaaagtctttattgtaaagcccccgacaaataccaaaccgaaatcgtccttttgacatttgatccaataaattcacatcttcaagttggcgcactggatgagcggtgggaagaacaatagccgcagtccctacattcaattttttggttgcaccaagtaaatatgcagcagcgacataagggttaccaagcaaaccaaactccgtgaaatgatgctccagtaaccatacagtatcaaaaccacactcctcagaaatacgacctaatttaaccaaacgtttcattacttctgtttgagaaaattgggggggttggtatgtaagcaaaaagtttccaaatttcatagagagcccttatatttgagtgatagaattaactatacccgttatctttcaagttgcttctttgttggctgcactcactcaccccggtcacatagtttgctatgctcccgggattcgctcccttgccgtcgcgatccatcttgaaatctatagggtaatatctatcccaataggttttaagacagcgaaatcgcttgattttcaatctcaattttcattcgacgttcattgactgtcgcaatagttagatgttcgaatgatggttcaataatatcaacatcaatatccagacgatcattatccatcgcgatagcagccttcgtaaccgattgataaaaattgcgcaggaccactaagttttcacccaagtcatgcgaactccctagcaaagaatatatcttgcatcgattactacgaatatttgataacaatgtgataacttcatcttgctttacccaattgtcgttatttgcagtaaaagcaataaacggtatatcaagatacatcatgctattgattgtagaagttaaatcttcccagccaaaatcaaggcaatctctcgcaaagacttcagcacccaatttatggccttcaaaatccaaattattcggcaattcattaatgggtaaactgagataatcaaatcctaaagctctttcaagcgtatatcttaagttaacaacaccgactgcggtgattaaaaatgaaacattaatttcagatagacttgcataaactatccgtgcagataagcttgaagccaaaataccacggttatttatttttcgtgtatttaaccaatcaaccacggctaataggctctgttttcctatagacattgtaaattcatcaattgtccctgaactcaacccaacgtggtgaagtgaatcatagcgaatcacatgaaacccattccgcgataaatattccgctaaaccagcaaaatgatccatccttcgggcaaaacccgacgcaataataatggtattctttctctttgggctgttttcttctggcagcgtttcccaaacatgaatttttttatttccttcaacacaaagaacatggtcgatggttttatatttggatttattttccatactttttacctattacgggacaaatacaaggaacttatcttcttccaggaatcgagtctgttctatttcaaccgcaacatccttagcagtataatgagatggcctctcatgagaaatatatgtcactaatcgttgtaacggcctcattccgtcatgagatccaccaactcgaaatatattattcattcctgcttctacaatcctttccgcacctcttaatgccaacgcatctcgatacttaaatgcggattcccaaggaaaaatagatatggtttgtgtcttatttttttgaacataaggcaatacttgctcaatattatcgacgtgatgaagatacacacatctgccaagtggttgattaaattccacacccgcatttgactcaataatcatccaacgttgatgaacatccacctctacttttaatccagcaaataagctctctttttggactaaagaataggccgccttttcatcaaaatcttttttggcgtttggtaatatatgcgcatatagattaagtttttctatcaacgctaacttaaattcctcatactgatttcccatgtaatatatgttttgggcagaaaaacaagcgcgctgatcgtaaaaacaaatatcatgagccgcaccggtagctgctgacgttaaatcaactggattatcaataatgcaaaaactctttttagagccaaatttaatcacgtcagcatagggtggtgcatgttctacagcccaattaatcgcatcttcccctccccaagcgacaataacatccatatgttgcataatttcttttgcgagtgatgtatcaccttggtgtggccaatatacaacagacaaagagcgcgttatcggatgattagggtctacatcgataaagcttaacgctaatgcattagcggtaaagggatcggttgacgatgtttttataatacactgattcttggttaaaattgcgcgtaatatagacatgatcccagataatggaacattacctgccaacagatgtatagacttacctttcggaaaagccttaatataactttcatcctgaggtagccattcatccatgatatggcgagaaccaagttcattttctacaacatcataaaggccacctttagaacataaaatcatagatatccagttggcctctaacttggccattgcttctgaatatcccatatatttttttaaatcacgaatgtatgtcctgcgtcttgaatattcttcatttttccatctttgccctaccgtatagagaaaattgacaatattatgcaaccgtaatttattattttcattataatcaataatgttttttacatgagaattattcaatattggcaggtaaacactattatcaccaaaattaatggattgcactaaatcatcactttcgggaaaaatttcaacctggccgttaataatgaatgaaatttttttagtcatattagccatccatttaatggggtaacttcaacttaagttattgtttaatcatcttgcaaactggttgtaccaatatttgcttcttgtatttttatgttacaacgataaaaataaaaagaatatccagaaaataagattttttattataataatctcaatctataagtttcgttagaaataataacgccctgaattttatgctcaaaactattaatgtaacttcgcgctcataaatataattcctgttccatttgtaatgtctgtaaaatagcaaaggaaactttttatatcaacaaaatttattaataaaaatttaaattaaagaaatcaagctcttctttatatacaaatattcatgaaactgattaaactgattcttcatttaataactccttatgctatttctctcataccgagagaatacattgaatggcaatgccgctttccaccagcaaatttctagaagaagagctcaagttcaaaatacctgagctctttgtgtatatagcccgcccctccaattaaagcaataaatttagctactttttgaggtgtgccgcggcttgtcgtacagcatcatagtagctggctggcagtatccccatacacggcgtaacagagattggcaacgtacgccaagctggcacaatttcaaaccagttagaatcataaaacagttttacttcgtggtttaaattgaattttgtgtcgtaagcaaggccagtcagttcaaaatcggtgtccgttgtctgaataagaaattcgccagggtaaatctgatgggttttctgcgaggtgccgtaaactacaatcaccgcgtgatcagtaggggatacagcgactactagcgccggtcaaggtttcggtcccggcgtcccgaccctttcaggaaaccggcaccacacaatgctgccgatagtggcaaggggagtaaacctgatagttttgtgttgctgtgccatccgttgcctctcgatcagaacaggcgttgagtaaagttatcatccgcaatgtcgctagctgcgctcgcttcacggatggtacagatctgctcatcactcaatggtccgtcatctttctcgtagtgcggtaggtagcggtcagcaaagttgcgcaaagcaaggtgtgcgatttcagttttactcagaccagtgactttaaccagttcatcgagcgtcccggcgctgatccctgtgggcgtatcctgattacgtaaacggattaagaaactggatatggtttttccttgggtattgtgcatagtgttttctccgaatcatgccaaaacaatatatatcaactctatatcatgatagcatattgatatacgttaccaaatccccatcactcccttgccgtcgcgatccatcttgaaatccattgggtatatcatatttttatattacctttgctgatcgatgataacgttatgccgcccggcaaacaatctctgttttgcaaatagaaagaatgtgtttccatatcatcaaatattatctccaaacatttttctaagatgacaaagaaacacatgttatcccaaaatcaattaactgacatttttatcaggacgccatcaggattattctttccatacgacaaatccctcaatataaagtttgtccagtgaagttttcaaaaacgtctctattgcaatctccggtgacataataagcggctgtcctctaacgttgaatgaagtattcaccagacaaccataaccggttatcttctgtacctctttcaataatcgccaaaaagttgcgttaaaagcacgttcaacaagctgaatacgcgccgttccatcagcatggacaatacctgacaccggcttcatcatttctggttttactttggcggtgcaaagcatatatcgagtcggcattaaattgcgtgtctcaaaaatagtgtcgcaatcctcatccaaaattgccggggcaaatggtcggaaagcctcacggaatttcactgtactattgattctatcttttattctttcacctgccggcaaagccaaaattgaacggttgcccagtgctcttgggccaaattccatccgatcatggaaccaagcaatgattttatcttctgcgatatctttagccgcggtcgcaaaataatcatcattcagccctaaataacgccatttcattcctgcattgccaccatgtcggaataatacattacggacttcatcggtagagaaacgaggaccgaggtaaggattaaagcaagaatcggcaccattgtgatattcaccagccacaaaaagcgcagcgcccaaagccgaaccatcatcccccgatgccggttgaacaaagacgttttccacaccatcaagctgacaaagaacttgatttgctttgcagtttaagaatgatcctccagcaagacagagtgatgtttcacccgtttttcccagccaataggttactaactgtttcagcagcagtgtaaatttttcctgtaatccggcagcaaaatcctgatgaacatcccgtaaagtgtcatcttctcttctcggcgtaaaaccaaacatatcactaagttgtgccattgcagcgggaaaaccatattccgcattatcaaatgctggcggtaaccagtttatctgtatcgttccgctctctacatcgaattgagctaattcattgaaaatatcacgatatcgttcagggttaccatacgcagaaagtcccataactttatattcatcgctattaaatacaaagccaaggaaccgggtacagatagaataaaatatgcctaatgaagagctaattggctggctgtacaatttctggaattgttggtctttagcaagataaacacttaaggattctatttcacccataccgtctgaaataatgcacaatgcagaagggaagccactaggataaaaggttgatgccgcatgagccaaatgatgatctaccccttgaaaacgcgattcaatattctgccatccctcagcagttaatgcattaatcatagtttttccactaaaaacctcctcgaataacgcttcattagacatgaaaaatcggcgataattatcataattaaaaccgtgggcaatcacctgtatatcatcttgcgtaagacctgcttccgccaaacaataattaatggcattagcaggaaaccgccctgttcctttctctcccgtaaaacgctcttccgccgccgctgcaacaatttttccatcaataatcacacaggctgcactatcgactccctggcaaatacgttcatctaatttactcacctctggattattctctcgcagaaaacgttgagcattaggaaggccactgatccctaatataatcattttcttcacctccaaattgttatttttctttcataaaaattaaactatacgctttatactgatagcccattttgtattaagtggaatcaagttaccttgccaaacaaagtaatggcattgttaccaccgaaaccaaatgcattattttatgtatttaaaattattcttcatttctatttaatgagtgattaaattaaatttaaattcaacaccctccggcaaaatatatattgaaaaacgcattccaactaactacctgcaacaattacgactattgggatagactctcatttacccagaaaaataactcataaacaatataaaagtaaagatatctgataatcagtttcatacccgtcatcttccaaattgccctttgttggctgcactcactcaccccggtcacatcgttatctatgctcccagggattcgctcccttgccgcgaagcatcttgaaatccatagggtacagattctattaaaaatagcgaagccaacattgaaataataaccttttctcattaaaacgattggcaatattcagccaggtgaagaaatatatttattataaatccaatctgctattttagctattaaccacttaatcccccatcaatgcaaagagatgttcctgtaatataggttgatgtactcaacgtccccacacaaaaactggcaatttcattaatatctgccattcgtcttaatgcggtgcttctagcgaattccatcttcttttctggggaaatatgacgcaacataccaccatcaacatatcccggcatgacagtgtaggccctaatattaaaacggccatagtcattagagatgttttttaccaatgcattcatggcggctttcgaacaagaataagcggtggcaccggtctctccacgtaaacttgctgtagaagagataaattgcatcacgccattacgattcttcataaaatgtggcagcaaatattttgctactcttgctgcaccaaataagttgacattaaaaacgtcatgccaaccctcaatatcctgagcatgcaataaaccatccaatgagattgccggtgtatagataaccgcgtcaatacatttcatcttctcaactgcaatgccaatggcttctctaacactgttatccgacataacatctaaataaatttcttcattacgcggtttacgtgaagtgcctaatacttcataaccacttgcaaccgcatgccggcaaattgcattcccaatttcacttgatgagccaataataagtatcttgctgttatatttatgcatttaaacattcctaccttatctaaaagttattttccaacagtaaaccctactttaaataaagcattcagaataaatattatctaaacaaaaaaacattattaatttatatattattaacgtatatattttagcttacctattttcaactcacttgttccatctaattctatgagtcaccctaaataatagggtgagttcttatatctgtcaaattattaatctaatatttaagcgatatcaacgcattggttaaattacatccaaaaattaaataaaaaatattatgcgtaaaaacattcaatatagctaatttaattcagtcataatcaatacatgtggtgaatgcataattaattatttaactccctaacaataacaattaaaaattgttatcaattatgttaattaattataaaaatgaaatattataatgctataattaatagaataaacatctggcttcaattttaaaaatattaatcagattctttatggaattaattcaataatattcaccaataagaatagattcttaatagaatcgatttcagcatatctcccaatgataaaaatgctattctcccttttactttttactttcctgccgttaagctattaacattaagtttgctctatggcactatcattttgaactaaaagcactatttttataattcggctttgtaatttggccttgcaatttgtctgtaacgaccttattacttttttccctctatatttttggtttatgcacagatgaaaactcgtagaatgaacggcatacggccgtttagtgctgtaattgatgcttgttggaaggaatcttactcttttgctcgtttaactaaagatattattgccggtattactgtcggtattatcgccatcccgctcgctatggcgctagccatcggcagtggtgtcgcgccacagtatgggctttataccgccgctatcgccgggatagttatcgcgataaccggcggctcacgctatagtgtttccggccctaccgccgctttcgttgtcattctctatccggtctctcaacaatttggtctgagtggtttgctcattgcaacattaatgtcaggcattattttgctggtgatgggattagcccgctttggtaaattgatcgagtatattccgctacccgtcacactcggttttacttctggaatcgcgataactatcgcaaccatgcaagtaaaagatttttttggtctgcaattggaacatatgccagagaattatatcaataaggttgtggctctgtttcaagctctgccaacgctgtatgtgagtgatacgctgattggcctgacgacacttgctgttctgatttattggcctaagcttaggctgaaattacccgggcatcttcctgctctcattgcaggaactgctgtgatggggatcatgaacttattcgatcaacatgttgctactattggttctgaatttagttatatattgaatgatggtacacaagggcaaggtatccctcccatcctaccgcaatttgttttaccgtggcatttacctgatatgggtgctcatcaggttgatataagttggtcaacggtttcagccctattacccgccgccttttcaatggcaatgttaggtgccattgagtcactgctttgtgccgtggttttggatggtatgaccggtaagaagcatcactcaaacagtgaattgattggtcaagggttgggaaatattgccgcaccattcttcggtggcattacagctaccgccgcaatcgcccgctcagccgccaatatcagagccggcgcaacatcaccggtttcagccattgttcactctctgctcgtgttattgactttactggcattggcccccatgctctcctatcttcctctggccgctatgtctgccttgttgcttatggtcgcctggaatatgagtgaaatacataaagttatcgatctgatccgccgtgcaccaagggatgacattattgtgctggtgctttgtatgtcgctcacggtgctgtttgatatggttatcgcaattacgatcggtatcgtattagcttcactgctgtttatgcgtcgaatagctaatatgactcgcatcagtcaattgccacaaaccaatgtcgataaagctctgctggttgttcgtatcaatggcccgctattctttgccgccgctgaacgtatcttcaccgaattaaaggaagaaagcgccagttatcagacaattctcatgcaatgggatgccgttcctgtgctagatgccggtgggctgcacgctttccagcgttttattgatgaagtgggtaaggataaatatattgctgtttgtgatattccatttcagccgttaaaaacactggccagagccagaatacaattgattgaaaatcaccttagctttcatgcaacattgccacgagcaatggaagagttgaatttcaatagcaaaacagttaactaaaacccgataaagagtcgtttaacttttttcaacataatggcgctgtaaaccagcgccaaatctattcatcaccaaatctcgccatcatttgatgtcatggcatcaaaaagccattttatttactggtatccagttgagggaaacttttcaccacatcatcaatcgctttcatctggctcaagaatggctcaagttttgccaacggcaatgctgatggaccatcgcacattgcattcgccggatcaggatgcgcttcaaggaacaagccagcaatgccgactgccattcccgcacgcgccagttcagcaacctgagcacgacgaccaccagacgctgcaccaaatggatcgcggcattggagtgaatgagtgacatcaaaaatgaccggatgcccccccgttgcctgagccataacattgaagcccaacatatccaccaccaaattgtcataaccaaagttgctgccacggtcacataagatcacctgatcgttgccgccctctttgaatttatccacaatatttcccatctgacccgggctaataaactggggttttttaacgttgatcaccgcaccggtacgcgccatcgcctcaactaaatcagtctgacgcgccagaaatgccggcagttggatgacatcaaccacttccgccaccggttgtgcctgtgccgactcatgcacgtcagtgatgattttcacaccgaaagtttgtttcagttcctgaaaaatcttcattccctcttccagacccgggccgcggtaagagtgaattgatgatcggtttgctttatcaaaggaggctttgaaaacataaggaatgcccaatttttgtgtcactgtcacatagtgctcacaaatactcatggccaaatcccgtgactcaaggacattcataccaccaaagagaacaaacggcagatcattcgcgaccttgatatcaccaatatgaaccactttctgttgcatacttataccttccgttagggaccaataaattaatgagataaatcagtgcagtgcgctattcatcagtgcaaaacaatatttcagtgcaaaacaatatttcagtacaaaacaatatttcagtacaaaacaatattcaatgtaaaacaatatttatttcaatgtaaaacaatgcattgctgctgaatagcatatatctgcattctgaccatttctgccaccgggtcctccgggcagtgctccacaaaataatttaaatcagaaaccgcaatatgattacaatcaagttccgcataaatcagccccctatcacgtatttcataggggttatcgggatcaaatatcagcacagcttcgctcgttctcagtgccaattccatctgcccttcgtccatcaatgcagcttttattgtatccagcactttacgtataatgctggcgttatccgctccttgcaaatcatcggctgttaatttagctgtctgactaatattgcctttaagccacacatcaagcacatattcacttaacgcttcaccattgagtggattaataaacctcgccgtgttatctggataatcaacacgcaaaatcaactgggttggaaaaaccaccggcataaacggtagcgctaaagcctgagcaatatggataagaattacccctaaaacagcagaggaaccttggcgagtttgcagtactttatctagccataatgtatccgacagacaataaacaccaccggcaccgccgaatttccagctttgataaaaaagcctcagtaatttttccaaccgttcttctatagttaactgcggagatatttcacgtctggcttcatcaatcaatgcttgaagctgcatttccactgaatgctgaggaaaatcagaacgcaatgttcgggaaattaacaggataccgctacttaacgatgcattattaaattcataatcagctatggctttcatcacttttccactgaccctgtgttattcgctcattaccgccataatcctgaaaagtagctacctgccgataaccactttcagaaaacaggcttcttataacatttccctgtttccaaccatgttccaataacaaccacccaccaggtaacaaaaaatggcgagatagatcaataatggtattcagatcagcaattccctgttttgccgcaattaatgcactatctggctcaaaccgaacatcgccctgagatagatgtggatcggtttcatctatataaggcggattactgacaatcataccaaactgttgattattcaacgaaaaaaaccaattacttaacaaaaaatccacattttgtattttgagtttttcagcattgccctgcgccagcatcaccgcatcaggattgatatcaaccccggtaacccggcaatcagggcgctcactcgcgattgccaatgcaattgcgccggttcccgttcccaaatccagaatgcggcaaggtgtcagcgatagccgttcaagtgccttttctaccagacattctgtatcaggacgtgggattaacgtagcgggagagacatttaatggcaacgaccagaattcacgctcaccggtgatgtaggcaataggttcacctttcacccggcgagcgagtaaagcctcaagctggctgaactgctctggagccaactgagtttcaccgaatgccaatagataagttcgggaatggtgagtgacaaaccccaacaaaatttctgcatctcgtttaggactgtcacttgccgataactgcattgtggcttgtttaagccaagatagataatccatcaatcctgctctgacaaagccgataatagatcagcctgatactcattcacaatcggctgaacaagcatatccaatttgccttctatcacttcatcaaggcggtacaaagtgaggttaatgcggtgatccgtcacccgcccttgcgggaaattgtaagtacgattgcgatctgaacgatcaccggaacccagcaagttacggcgctcagaagcttccgcttcctgacgtttacgaacctccgcagcgcgaatacgggccgccaataccgacatcgctttcgctttgtttttatgctgtgaacgttcatcctgacattcaacgacaatgccagttggaatatgagtgatacggatggcggaatccgtggtgttgacatgctgtccacccgcacccgatgaacggaacgtatcaatacgcagatcacttggactgatttccggcaactcggcgtccgggatctccggcaaaaccgcaacggtacaagcagaagtgtgaatacgcccctgcgattcggtttccggtacacgttgaacacgatgaccacccgattcaaattttaaatgaccataaacctgctcaccggaaactttcgcaataatttccttatagccaccatgctcaccatcgttagcactgatgacttcaactttccaacgacgggattcagcataacggctgtacatacgaaacaaatccccggcgaaaatcgccgcttcatcaccaccggttcctgcacgcacttcaagaaaacagttacgctcatcatcaggatctttcggcaacagcaacaattgcagttgctgctctaattcttcattgcgaaccttagcgtccctgatctcttcctgtgccatttcccgcatttcagggtcatcaagcattatttcggctgctttaagatcatcctgaaccgcactccaggccttaaaacagttcgtcacatcagtcagttgagcatattcccgcgacaaagcacgaaaacgttcctgatcagcaatcacatcggcatcaccgagatgagccaaaacttcctcgtgacgttcttgcaatgcttccaatttagcaacaatagaaggcttcattcttggtttcagaccctattccgagatatggttaattatgttccagccccaggctgtcacgtaataaattaagacgctccagatcaccattgctggctgcttgctggagtgatttggtaggagcatgtatcaagcggttcatcaattgatgagtcaattgattgattgcctgttctacgtcagctccctgattgatagcagtcagtgccttagccgccatctcagcccgcatctgttctgcctgattacgatactcacggattgaattcactgcactctgcgaacgcaaccaatccataaaataacggctttcctgctgaacaatacattcagcctgaaccgccgctgctttgcgctgcgcaagattctgctgaataattgcctgcaaatcgtcaacactgtagagatagacgttattgagtttttccacatcaggctctatatcacgaggaaccgcaatgtcaacgagcaacatcggttggttacggcgtaactttaatgcacgttcaaccatccctttaccaataataggcagcgggctggccgtcgaactgataacaatatcagcttcagctaaacgtatatcaatttcaggcaaggtgatcacttccgcctgaacttcatcagccaatacctgtgccttctcttttgtcctgttagcaatcatcatatggtgcacacgatgctctctcaaatgacgagccgctagctcaatggtttctccggcacctaccagcaaaatattcagttcagaaagtgattcaaaaatctgccgcgccaaggtacaagcggcaaatgcaacagaaaccgcattcgaaccaatctctgtttccgttctgatgcgcttggcaacagaaaatgatttctgaaatagtcgctccagttcactcgataaagagtggctgtgctgcgactcggcaaatgctttcttcacttgcccaagaatctgaggttccccaagtaccaacgaatccagcccactcgccactctcatcaagtggctaacggcttcattatcacaatgccagtaaatactggattttagctctctgggattcagttgatggtattcacacaaccagccaattaactgctcatacagattatcttgctgttctacgctgagataaagctccgtacgattacacgttgacaacacaaccccccctttcaccaagggatgctggaggaggttatcaagcgcttcaccaatcgtatctggagaaaaagtcacccgttcacgcaaggatacaggggccgttttatggttaataccaagtgctaacaaagtcatatcaacttcattgagttatcagcagagagatcgttcatcgtaaaaaacattctatacccgttatctttcaagttgcttctttgttggctgcactcactcaacccggtcacatcgttatctatgctcccggggattcgctcccttgccgccgcgatccatcttgaaatccatagggtataatattgatgaaatcatcacccttaataaggactcttataagctgtgcattctacttgatacctcagctcaataaaagacaatcagcagtgtctgatatcattattcagaacatttttttgaaatttaactggattaatagttcattcttcattattaagtgatgtaaaagttttcacgttattaaacagagattaccgatgaagccaatacaaaaattatcactattccgcctattgccactctcttgtgtactactgttgaccgcctgtacattaacacaacctggcggaacaggttcggcggattctcctcaatggcgagcacatacccaacagctacagcaattaaatcaatatcaaacacgtggatcttttgcctatctgtctaatgagaaaaaagtttatgcccgctttttctggcaacaatatcatcctgaacgctaccgtttattactgactaacccactgggcagcacggaattagaactgatcgttcagccaaacatgacgcaattaaccgatagtcaaggtaaaaaatattttagtgataaccccgaagagataatttatcagttcaccaatatggatattccattagataatctgcggcattggataacgggtctccccggtgatgccaaaaactttaaactggatgctaactatctattgaaaaccgtcaattaccagcaaaatggcgcaacatggcaggttaactatcaatcctacgatacctcaaccacccccgcccttcccaaccgtctggaactgattcagggtgatcgccgcattaaactgaaaatggataactggaccacaaaataatgacattcacttggccctcaccggcaaaactgaacctatttctctatatcaccggtcgtcgcgctgacggttaccaccagttacaaacgctatttcaatttcttaattatggtgatgaaattacgattacccctcgtcaggataatgaaattcgtttactgacacccgtggagggagtggaacacgataacaacctgattgttcgcgcagcacgtctcctgcaatcctatagcgacaaacaccatgcgggtattgctcataaaggtgctgatattcatatcaacaaacgtctgccaatgggcggtgggttaggcggaggttcatccaatgccgctaccgtactcatagccctgaattatcactggcaaaccggtttcacagacgaaacactggccgccctcggcgtaagtcttggtgctgatgtgcccatctttgtcaaagggcatgccgcattcgcagaaggtattggtgaaatcctgcacatagccgagccggaagaaaaatggtatctggttgcgcatcctggtattgaaatctcaactctgcgtgtcttcacagatccagaattaaaacgtgatacaccaattcgccctctggccgcattattaaaggctccgtacctaaatgattgtgaatctcttgtaagaaaacgtttccgtaaggttgaacagcttctttcatggctgctagaatacgcgccgtcacgcctgaccggaaccggtgcatgtgtattcggtgaatttgaatcagaagcatcggcccgtaaggtgttaaatcaagcccctgagtggttgcagggttttgttgcgcgtggcgttaacaattcacctttgcacaatttccgctctgggatacccgtgttattgagccaatgaataaatatgttatttaacattggtcaacaatatctctctggacgcaagcctgaggtctttctcgtgcccgatatgaagctttttgctggtaacgctatcccggaactagcacaacgtgttgccaaccgcctgtacactaatcttggagatgctgctgtcggccgtttcagcgacggtgaagtcagcgtgcaagttaacgaaaatgtgcgtggtggtgatattttcatcatccagtccacttgtgcaccgactaacgacaacctgatggaattagtcgttatggtggatgcactgcgtcgtgcttccgcaggacgtattaccgcagtaatcccttatttcggttatgcccgtcaggaccgtcgagtccgttccgcccgtgtgccaattaccgccaaagttgttgcagacttcctgtccagtgtcggtgtagaccgcgtactgactgttgatctgcatgctgaacagatccaaggtttctttgatgttccggttgataacgtatttggcagtccaattctgctggaagatatgctacagaaagagttagaaaaccctatcgttgtttccccggatattggcggggttgtccgcgcacgtgctattgctaaactgctgaatgataccgatatggccattatcgataaacgccgcccacgcgctaacgtttctcaagtgatgcatattatcggtgatgttgctggccgcgactgcgtgctggtcgatgacatgatcgataccggaggcaccttatgcaaagcggctgaagcattgaaagaacgcggagcaaaacgtgtatttgcctatgctactcacccgattttctccggcaatgcggtggataacattaaaaactcggtgattgatgaagtggttgtttgtgacaccatcccattgtctgctgagatcaaagcgctcaataaagttcgtactctcactttgtccggtatgttagctgaagcgatccggcgtatcagtaatgaagagtcaatttctgcgatgtttgagcactaataaataagttgtactcatatatgaaaaaacccgttgtacaagagcttcaacgggttttctgcttactctggaagaataatacttctccatttttgttatggataccgatgactaccacgacgataacgctcatcatagtttcttagccaccaataacgatctgccacaccttcccggcctcccacaccggcaccagccaaccaaacaagcgcaccaataaaaacgcccaatagcgctgcttcagataaaaactcaggccagccaaaaccgaagatgtgaggcagtaatgtataaaccaggctactcactatggtgaacataccgacacccatcaatacattaccgactatgaaggcactttgacgtttcatatgttacctccaacattcttcattaatacacactcttcgttaatacacactttccgttaatacacactctccgtgaacactaagaaccgaaaattcaacagctaacgttaattgactctatataactttatagcctatttatagtatagccctatttcataaaaggtcattgcggacacgatcacaactaaaggagatttaataacaattccctcatcattgtgagaaataacatgaagaaataatgagttagtaacctgaactttgcttaaagagaagttcaggtttttaactaaatattgatatataacaatgatagttgtgaaatcccacccaggttatatattcttaatcaatgattcctaccgggataataaaaatcatcttattttcacactgcatgataacggctaaaaacaggggatttgtctaattttttaatgagtaaccatcaatcagcatccccaaatatccaacacctaatatagccctggggttaattctatccacgcttgagaatataccctcccatcaatacaacttatatacaccgatgaaaattcactcatgggaggtacatgattatgaggcgaatacccccgagaataagaagaagaaactctaaagctaaaatagccatttttatcggtagtcatatgcttgtcttgatcactcaatgacagataagatcccatagatactcctatagtgacattaggttcacctacgccattcttatataaatatccagctataataccgcttgaaaatgaatacagcacagccggaaattctataatctttaactgatatggattatacgtgaaacacatagctatagccttttcaatagctcccgcttgtgccattagtatcacttcaccagcacgactagattgtattgacgccgttatcttaccatctttatctgtcatccccgacgacggaactactgttgctccactatctgcatagaaggttatttcttggtttttaattccattacccaaccgatcatacaccgttgcaactaccttattctcatcggcacccttagtccatgcattatttttttctaagtcaagattaagcactgccaccgattgaggagcaacagtaaactcgacctggagaggaggggcttctatttcagtatcatcttccaagcaagcatacacattcccttgacacggagttgaatcagtagagattatttcaactgataccttacccagtactcctgtaccttttataattttacgatcattattctctttaaataccatagattgattatctaacgtgaaaattatattcaccccatgcaataaataaccatcctggattgcgcttacaccgatatctatcggtttatccgcagtttccgttttttcacttgatagccaatttaatgttttagcctcttttggtgcttgttcgtcattcatttcattctcctaatttatcactatcatgtatatttatatatgtcatcatcgatttaaagttaaaaaaataatttcaagttgataacattatactaattaacaatattccttacgctaaacaaaaggaaagtgtttaaaattaatagaaaattgaatcgacttatcagtatcgggtaaacttattatcacattatttttttctgctttggtattagttatatggaaagttgtacaaccatctttactaatcgcaacctgcaactctctttcattatcaccataacctgaaattatcgcggagccatcagtacgaacaagtaatcttttaccggaatagacagtacggtccacaataacataaccactacaaacactcacgccatcagcaggtacttcagaggtaaatgcataagcactgataatatttcctccatctctccactcactaaatactgcctgacttacacccggtgttatagaaccatcctccgccgaaacagtacaacgaaaactacccgctacctcagattgcaaatggaaataagccagcccgaaactattaggggaaaactgatattttgcaccacccccttcaacaatactgcctgattcaacactggccgataatctctttcctggcggcccataaaccacagctaaatttttcgggtttattctgggatattcattagataccatcggcgcaccttcactaattgatatcatggcagatgacatatccgttagcgacaatatcactgaacctggagcagaactattattaccaacctcataataccctgttcccacgccctcttgacccaaacaaagcacattttccgccggcaccactaaagaaacataaccctgcttaacatcctcatcactgactgttattggttgtgcatcccaggccgccctcgcaatcggatcatagtcaaaattatgcccttgccagtggaatatgacgctatcgcctttctgcatctgctgataactaatatgcacatttaacccactatgttgtacaagagatgaatagtgaatcacgccagatgttgaatctggataaatggatggtaataattttatcgatggggaattaataattttaataacagccggtttagagaaattttcattctcgaaatcatcggctgatgtataagtcacattatagcaaccatccggtatttcagagaacggaatagttacagtaaaaaaatcaagattaatattctgaatataatagggccgagaaaatatccccccaacatttaccacgatcatatccccgattcttagccactcatgataaggtactttgataattaaatcttggttctgttgaacagaaacatcaatcaggccatcgtgttctgcttgcggcaattctggcgacgataaagaaataggtgtattgtcgttattggtaatcatatttcacctcccattggagtcggtctgaacgataaaacaaaattgactttatcgcctgaatctgaatcaggcgctgttagccaaacattaactttacctactgtgttgctaatcacattcactgtcgcactaccatcctcctttaatggaatatctgcccaatctttattataaccatcgatgagggcattattattcactcttatccggatttgattaatatcatcattatgttcacgatcaatgaaaagatatatcgagcaaggcgtcttgccatctgccggagcgcctgtagtataattataggcggtaaatattatagcctcatcagactgacgataattaccaaaagtaagcggaaaagacattactttattgatatcctcttgcggggcaatcaccacaaaagccgaaaattcttcgctatttttaatatttttatgttcaaacggagaacgaacataaaaatgtccttttccagtctcatctaacgtcaatatgatctgatctagattaatgttatcgtctacaatgaaagcaccgatagatgtcgtagcatagaatttatgcccaggcaaaccatatagagtcacaatattttgagggttaagattagggtaatcggttaaatcactcatcgccgcgttttctgtgataatcacacttgatatgccgttattcatattgtcaccattaactccatgatttattaatcgaaaataaaataataacgcttaataaaatattaaatctcaatcagttaaatttatcgtccggggggaaccgtatcaatgcgtccataccaaatcttagagtgctttgtactttcactacactccatgcctacactataagtgatataaacccagcctggcgtaccatcacgatatgaatttacattagtaaaaatcgcccgaccaagtggaataatagcttctccagcgtccattacgtcggcagttaccgtatgaggtgcaagagaataaatctttgaaaatggattctcattgataataccattaacgtaaatacgtacattaatgacattatttatctctatcccattcttttcacccacagcaatatgagcatccaaccctcctcctaaaatacttgcaagattaatcttgcttgactgtctaaattctacctgatctttatgactgaaaattctgggtaccgctaatatacgcctaatctctggtggtacatttagtactggcttcgttaaattaaaatagcgggcagatgatacagcgacgtttccagttgcatcagccacataataatacaactcattattgccagtatttggaatattggcatatggaactgaaataaatgacatatccaactgattcagatcagtaatgacagcagacgcaccttgcgtttcgtcatcatcttctctaattattaaaaaaactctatccctcggcctaacaccttcataaaatggaataatcacatgaaaatctgtattgctatttcctactgatggcattaatttattaccattcagttctgcaatatctggcgctggaagcgttggctcaatatcttcggtaatcatcaaaatgtttgatgaagcgctttttaaaagatatggcagttttgtcaacatattcactgaatagttaccctcagatttcttagggaaaactattaaggcaataaatcctttactatctgtattaatataatattgacaattatctttttcactaataaacggcaatatttcttccctaatttgccctctattataaccaaaaatacgcactggcttatccgttaccagaggaatttgaaaataaggaagtggatcattttttttattcaaagcataaatattaataagcagtctgtcattaaatagtgaaggtcgccaattatcttctgccggagaaaaatcttttacccacgaatcgccaataattataggggtaaacccttcgtatgaaaaatcatttttaccaatagaatgaaactcaatctctaatttagcatcaggatcggtagctttatccattgaaaacattatggtgaaatcactggcatcagaataagcagaaacaacaaattttgcagtgtagatattattcttgacatcccttgaaatacgcggaatctcatcaaaactgacatcttgctggtcactgtacactatatcagtcgcttccgttactttatgaacctcatcacctgaataagtcacagtgataacaactggacacccttctaaaatcgttattcctgaaacgatatctgctgtaagtgtagacatattcaatctcatattaaagttaaacatcaataagtaaaaaacatctaattttctatcaaaattaatacacttccacaatgatgccgactacctattacctcctttctacttctcaacaaataaattatttactttagccggtcatgtaataacaataaatccatcactcagagcataagctttatatccaagcagacaacataaccataatttttatatgattaagacaatggtaatcgttaaatcacttttcaccatgtttgctattattcatactgtcaccattaactccatgattcattggttgaaaataacccacaataaaaaatcgctagtttacaaataagaaacatgtccggggaaatggaaaacgcttacgcattttccataaacgggtaaaatctcaatcagttaaatttattgtccggggggaaccgtatcaatgcgtccaaaccaaatcttggagttctttatatttacactataagtgacataaactaatcctggtccatcatcatacgagtccacaccggtaaaaggtgcctgaccaagcagaataatagcctctcctgccgccacttcttcggcagttaccgtatgaggttcaagagaataaatttttgaagatgggctatgattgacaataccattaacgtaaatacgtacattgataatactatccacatctattccattttttttacccacagcaatacgcgcatccagccctccccctaaaatttttacaagattgatcttacctcgctgtttaagttcgctctgatctttatgagtaaaaattctagctgccgctaatgtacgcctaatctctggcggttgattcggtactgacttcgttaaataaaaatagagggaagatgatatagctacgtttcccattgtatcagccacataatagtataactcattatcgccaatatttggaatactggcatatggagctgaaataaacggactatccaactgattcagatcagtaatgacagtagatgtactttgtatttcatcattatcttccctgatcattaagaagattctatctttcggtttagcaccttcataaaatgggatactcacatgaaaacccgtgctactatttcccactgatggtattaatctatcgccatctaactctttaatatctggcatcacaagggttggagcaatatcttctgtaataaacagaatatttgacgaagatttccttgaaaaaccctgcaactctgtaaacatattgactgtatagttacccccctctcccttgctagggaaagctcttaaggcagcaaaaccttcactattcgtattaatatagtatttactattattgagttcttgaataaaaggaaatatttcttccgtaagttgtccttcctcataaccaaaaatacgtaccatcctatcagttaccaagggaatttgaaaataaggcaacggatcatctgttttattcagcgcatagatattaacaatgaggctgccgttaaactcagaaggttgctcatcatccgctaccggagataagtcttttaccaacgaatcgccaataatcataggttcaaacgctgcatgtgaaaaaccatttttatcaataggatgaaatgctatctctaatttagcatcggggtccgtagtcttatccattgaaaatattatggtgaaatcattggcgacagaatgagcagtaacaacaaattttgcagtgcagatattattcttgacatcccttgaaatacgaggggtttcatcaaaactgacatctttctggtcactgtacactatatccgtcgtttccgttactttatgagactcatcacctgaataagtcaccgtaataacaaccgggcactcttctaaaaccgttattcctgaaacgatatctgctgtaagtatcgacatattaaacctcatattaaagttaaacatcaataagtaacaaacgtctaatcttcttaccaaaataatgcgtttacaccacgatgcttactgtctattacctccttcctgtttgttacaaaaataaattatttacttcatccgttattttttggtcaagattaggataactgtaaaattacttctcaccctgtttgccattattcatactatcatcattagtgccatgattccttggtttaaaataaaaggacaacactcaattaaatattgtatctcggtaatgaaaaaatcgccaattcacaaaataagcaacatgtccgggaaaatggaaaatgcttatgcattttccataaacaggtaaaagctcaatcagttaaatttattatcctactggagcagtattaatgtgcccactccaaatctcagactccttcgtgtctacactataagtgatataaactgagcctggtgtaccatcacaatacgaacctaccttagtaaaaggagcctggccaagctgaataatagtttctccagcagccacttcatcggcagttaccgtatgaggatcaagagaataaagtcgtgaggatgggttatcatttacaataccattaacgtaaatacgtacattaataacactatccacatctattccattgttttgacccacagcaatatgggcattcaaccctcctcctaaaatattttcaagattgatcctacctgactgttcaaattctaactgctgtttatgagcaaagattctgggtactgctaatgtccgcttaacttctggtggttcattcggtactgaccctgttaaattaaaatagagagcagaagacatagctacatttcccactacatcagccacataataacataattcattgtcgccaatatttggaacgctggcatatggaactaaaataaatggattattcaactgatacagatcagtaatgacagtagacgcacctagcgtttcgtcattatcttctctaattactaaaaaaatcctatctctcggtttagcacctttataaaatgggatactcacatgaaaccccgtgctactatttcctactgatggcgttaatctatttccatccagctcttcaatgtctggcgcaggaagcgctggagcagtgtcttctataatgaaaagaatatttgatgaagcgttctttaaaaaacccggcaattctatgaacatatcaacggtataattaccaatcttctccttacgagggaaaacccttaaagcaacaaaacctttatcatccgtattaatatagtatttattattattgatttctttaataaaaggcaatatttcttccgtaatgttttctccatcatacccaaaaatacgtactaaattatcaattaccagagggatttgaaaatagggtaacggctcatttgttttactcaacgcatagatattaataagcaagctgccattaaattcagaaggtcgttcatcatcagctaccggagataagtcttttatcaacgaatcgccaataatgataggttcaaacgctgcatgtgaaaaatcatttttatcaatagaatgaaatgcaatccccaattcagcatcggggtccgtagccttatccattgaaaatgttatgatgaaatcaccagcgtcagaaccagcagtaacaacaaattttgcagtacaggtattattctcgacatctcttaaaatacgaggggtcttatcaaaacgggtattttttgggtgactgtacattatgtcagtcgtttccgttactttatgtgtatcatcacctgaataagtcacagtaatgacaaccgggcacgcttctaaaaccgttattcctgaaacgatatctgttgtaagtattgacatattaaacctcatattaaagttaaacgcctatacccgttatctttcaagttgcttctttgttggctgctctcgctcaccccggtcacatagtttgctatgctcccggggattcactcccttgccgccacgatgcatcctgaaatccatagggtatataagtaacaaacacttaattttctgtcaaaataatgcgtttatacaacgatacttactatttattatcctattacctccttcctgtttgttacacaaataagtattcattttagctattaatgtaatagcaataaacccactactcataacataagctttatatccaagtatatactatatagtcacaatatatctggggctaaaactacgataattgttaaatcacttttcgccatattgaccattattcatactgccaccattaactccgtgattcattggttgaaagtaaaatgacaacgcttaataaaatattatagcttggtaatgaagaatcgccagttcatcaataagaaatatgttcagaaaagtggaaaatgcgtgagcattttccaacaaacagataaaagctcaatcagttaaatttattacctaggtggaacagtatcaatatgtccaaaccaaatcttagattcgtttttgcctacgctgtaagtgatataaaccaagcctggcgtaccatcatcatatgaatctatattagtaaaaaacgcctgaccaagtggaataatagtctctcctgccgccacttcgtcggcagttaccgtatgaggatcaatagaataaattttcgaagatggattatcattgataataccattaacgtaaatacgtacattaatgacatgatttacctctattccactgtttttacccacagcaatatgggcatccaaccctccacctaaaatatacttaaaactaatcttacctggccaactaaattccttctgtcgtttatgattaaagattctaggtctcgctaatatacgcttaatctctggtggtatatttggtgttgatctcgttaaattaaaatagagggcagatgacatagttatgtttcctattacatcagctacgtaatagtataacccattattgccaatatttggaatactggcatatggaactaaaatagatggtatatccaactgactcagatcagtaatgacagtggacgcacttggcgtttcatcattatcttctctgatcattaagaaaattctatctctcggtttaacaccttcatagaacgggatactcacatgaaaacctgtattgctatatcctgttgatggcgttaatctatcaccgtccagctcttctatatctggcatcaccagcgctggagcaatgtcttctgtaataaacagaatatttgatgaagatttccttgaaaaaccctgcaattcagtgaacatattaactgcatagttcccatcttcctcctgactgggaaaaatctttaaggcaacaaaacctttatcatctgtattaatatagtatttattattattcagttcttgaataaaaggaaatatttcttccgtaattttttccctatcatacctaaaaatacgtactaatttatccgttaccaggggaatttgaaaatagggtaatggatcatttgttttactcagcgcatatagattaacgaggaggttaccattaaaatcagaaggctcctcattatctgctgccggagataaatcttttatcagcgaatcaccaataatgataggttcaaatgctgcatgtgaaaaaccatttttatcaatagaatgaaatgcaatttctaatttagcatcggggtccgtagccctatccactgaaaattctatggtaaaatcaccagtgccagaattagcagtaacaacaaatttcgcagtgcaggtatttttctcaacatctcttgaaatacgaggaattttatcaaaataggtatttttgggggtactgtgcactatgccagtcgtttccgttactttatgagcatcatcacctgaataagtcactgtgataacaacttggcacgcttctaaaaccgttattcctgaaactatatctgctgtaagtgtcgacatattaaacctcatattaaagttaaacaccaatcagtaacaaacacttaattttctatcaaaataatgcgtttatacaacgatgtttactctctattacctccttcctgtttgtcacacaaataaattattcactttagccattactgtaatagcaatgtattctttatccaaaagatatcgtaaaataggatacgatgcttcctcctcacattcaaaaaactaagtcagaaaccatcagcatatgagtccacatatgaaaaaagcgactgaccaagctgaataacacttattctaacctccgtatcttccttgattcatgtatgaggatcaatagtaataaatacttaatctaactcctctcccataataccatcagcgtaaacacttacatcaataacatcatctacattgatttcaacttccagccctacaacataagcatccaagtcccttccctgaataatcaaataattgattttccctcgctgttcaagttctaaataaccttggtgagtaaaaattccagctacagctaatgcacgagaaacccctgtgatcgttcattagagactggctcgattaaaataacgagaagatagcatggctacattttcactataagtagcagtaatgacaactgagcactcttctaaaatcgtcattcctgaaattatatctgctgtaagtgttaacatattaaacttcatattaaaattaaacaccaaccagtaacaaacacctaattttctatcaaaatagtgcgcttcaacaataatgctcactacctattatttccttcctactcttcacataaaaccacataaaaaattgcatttggatctttctccttcaacaaatgaacctgaatactttcgtcatttatttgtagccctcccattgttattccgttagaatttaacgaagctcgtggatctcctaataaacccttatcaataagattcaaattcaaatccttaaccaaataatcaattgaaccaccaagatcactctcctttatcctatttcctcttgtacaactaggtaaaggcttactcgtgtcaatacgatccttcgagtaagcggaaccaatccccggccctgtcgagctagaatcaacaattacaaagtgatcaattttcacatcgggaataatatattttaaataccggccagattctgggtgtgtaaacgtcgtagttaatgtagccgttcctgcttttttaacttgaaaataatgtccatccacatcaactacgttcctattacttgagtcatatactccagtataaccagctatagttaattctccaggcaaatactcgggttcaaacctcatttttggccaagcaaaattcattctttcttttggaaccgaacgcccgggtccttttccatctttagtgtcataatccattataaagaagtcagtaacatcctgctcattagccttaatttctaccgttttattcttagaaccaacagatgaatcattcactttggccgttaccataacagcaacaaacccgccacttttactatatacctgatattgcgctttcccatcagcatctgttttaccatcacccactacctgagttaccaagtttttatcagtaatggtgactcccttactatttgctgcactccaggccaccgtaataccgcttttcgcctgcccggaaaaatcttttactgtggcagtgaaggtataagtatgcccctcgccttctccttctgttacgtgatctgggctaacagtaagagaagcaagctcatcagggctgataaaactgacttttttatctacattcaccggcgtctgctgagtagctgtttttgcggacacttgtacatcaatcgctaccactgtactggttaaggtcgcggtcacctgtccctgcgcattactcactgagttgttctgtttcgtcagttttaacccgtcagcctttggatctgtctgccagtcaatgtcgaccggttgacccaccaccagattgccgtgcccatccttcactgtcgccgtgaagatataactgtcagtaccgttgttgtagtgcttctcgtctttatccacttccaccgtcacgctggcgacataatagctggcgctgaactccgtaaaactgactttgccgttcgcattctccgccgtcttctggctggctgttttcgccgatacctgcacattctccaccgccgctgtactggttaaggtcgccgtcacctgtccctgcgcgttactcactgagttgttctgtttcgtcagctttaacccctcaaccgttggctctgtctgccagtcaatgtcgatcggtttatccgctaccggcttgccatgcccatccaccaccgtcgccgtgaaggtataactgtcagtgccgttgttgtagtgcgccttatctttatccacttccaccgtcacgccggtgacttgataactgagactcagctcctcaaagctcacctttcgatcagcatcgacccatgacgggttcgccgccgccttcgccgatacctgcacatccttcaccgccgccgtgctggttaagatcgccgtcacctgtccctgcgcgttactcaccggattgctttgtttcgtcagggttaacccatcagccttcgggtttgtctgccagtcaatgtcgattggcttatccgctaccggcttgccatgcgcatccactaccgtcgccgtgaaggtataactgtcagtaccgttgttatagcgcttctcgtctttatccacttccaccgtcacgccggtgacttgatagctgaggctcagctcctcaaagctcacctttcgatcagcctcgacccatgacgggttcgccaccgccttcgccgatacctgcacatccttcaccgccgccgtgctgattaaggtcgcggtcacctgtccctgcgcgttactcaccgagttgttctgtttcgtcagttttagcccgtcagcctttggatctgtctgccagtcaatgttgaccggttgacccaccaccagattgccgtgcccgtccttcactgtcgccgtgaaggtataactgtcactgccgttgttgtagtgcgccttgtctttatccacttccaccgtcacgctggcgacataatagctggtgctgaactccgtaaaactgactttgccgttcgcgttcaccgccgtctgctggctggctgttttcgccgatacctgcacattctccaccgccactgtactggttaaggtcgcggtcacctgcccctgcgcgttactcaccgaattgctctgtttcgtcagttttaacccgtcagcctttggatttgtctgccagtcaatgttgaccggttgacccaccaccagattgccgtgcccgtccttcactgtcgctgtgaaggtataactgtcactgccgttgttgtagtgcgccttgtctttatccacttccaccgtcacgctggcgacataatagctggtgctgaactccgtaaaactgactttgccgttcgcgttcaccgccgtctgctggctggctgttttcgccgatacctgcacattctccaccgccgccgtgctggttaaggtcgcagtcacctgtccctgcgcgttactcaccgagttgttctgtttcgtcagttttagtccgtcagcctttggatctgtctgccagtcaatgttgaccggttgacccatcaccagattgccgtgcccgtcctttactgtcgccgtgaaggtataactgtcactgccgttgttgtagcgtactttgtctttatccacttccatcgtcacgctggcgacataatagctggtgctgaactccgtaaaactgactttgccgttcgcgttcaccgccgtctgctggctggctgttttcgccgatacctgcacattctccaccgccgccgtgctggttaaggtcgcagtcacctgtccctgcgcgttactcaccgagttgttctgtttcgtcagttttagtccgtcaacctttgagtctgtctgccagtcaatgtcgattagtttatccgccaccggcttgccatgcccatctaccaccgtcgccgtgaaggtataactgtcagcaccgttgttgtagcgcttcttgtctttatccacacccaccgtcacgccggtgactcgatagctgctgctggactccgtaaaactgacttttttatccgtagtaacacgttcgccattaatcctgacgctaacttgtatatcggataatggcgttgtactggttaatgttgcagtctgttgtccatttttatctgttgcttctgaatcaggctttaatttcaatccaggatcttttttatccgtatcccaaatcaatttggcattttctatcggcgtttttttgtcagcgccaagcagggtagctgtatagacatatttcgcatttccatcagcaattaaaggatcggttgtattaacactcaaagagatattacgttgtaatacatgagcttgtatttgcaccctcagctgatcatctttacttgtacctgttatagtatagtcattttttccatcaggctgatattccggtaactgaatggtataaccatgagtactttctatatttatcatcccgccattcttctggaataattcaggtatatcccaagtcacatttttgaatggagtatcagattgaatttgtattggtttaacttcaccaccgtaactactaatttctattacagggaccagtaacctaaaatgttgctgttttttcagataattcaaaataatattattatttctttcaactaagtcgtaacgactgccggccaagcttcgtagtgaagagacattttctggtgaaagttgttctgacaacggaacaccaaatcggtaattcacattgaatgaaaatataccatcactttttccctcttttcctaatttatagtcaatccctgctgtgatcagtggaattggggtataatttaccccaatagttgccgcatagggatctttttgtctcttgttctttccgaataatgcaacattatcaccaaaatattgttcatattttattttggcaccgagtgacggcattgaaggtaaatacatgtcggcaataaggtcataaccattggcagggcgctcataataattgactaaatcacgggcgttatgccaatcactcaggcgaaaataggcgttagcagacatctttaggtagttagtccatagttcaccacccaagctgaatcggctattattaccagttaaatcattatcgtaaaaagtgttcgccccatacatccagttatttatgaataaacgggtgccaatgcctaaattcacagtgtcacggctatctttatgacgatagccatattgactataaacaagccaatgatctttatcatcataaaaaggaacgagtaagtctacagaactttcatccagtcgcccacgatgatcaacatttaaattaattttagctgtaccaaactgtgataaccacttctgggtattacttgttatctgactgtttaatttattaacaatataatcctgtgccaattttttcggatctgaatttaataatccaaggattttagtgccatgagataaaattaaaggagggagggggtgattaccgtctttatgactatcttcgtctaaccacagtatttttggtttttcaccgctatcgttttttcctactacgcttctctttgataaaaaattaccacatctcctcggctctgatcgctttttctctttataagtaacgttttcgtgtaacttattgctagcctgctcggttatctgttttttgctatcaatattatgctctataactgcctctgggtattcctggcaattttcaataccaatcaaagactttactggttcagataaagcaggataactttttagtagcataagcgctgcaaataaaaaacagacgattagcacacctttatttatcttacaatttattacattacgagaattacgattgatgctcatcagaaattacctaaagttattgctgttatacccgtcatctttcaagttgcctctttgttggctgcactcgctcaccccggtcacatcgttatctatgctcccggggattcgttcccttgccgtcgcgaagcatcttgaaatccattgggtatatattcagttatagctaatgagtacaataaattactttttatgactttgtataatgaaaataaattatcagtcgataacaataagtaatcacttagcaaaataaaaatcgtcgtaaatcatttactaacacggcattaaatatttatacaactttcattaaaaacaaactttcattaaaaacataagcagaaaacccgctccaacgggttttctgtctatttatcattattgagtttacactcagtgattatggttattatgatttttccggcagttgaactcgaacattaatcactcgtccatcggggatatcacagagttcaccatcattataataaatgacttctccatcactattaacgctcttaacacgtttattttgagcaaatatcggcgcatctttattttgacgatgataacattcgatggttatattgccattagatggatctactgattcacaaacccaaatcaaatttaatccgttgctatctgccgggacaattgtaccaccgtgaattccccatgctccatctttagcgaaaccgttgcagccgctgatgcgatatttccctgtctcgatccgctcgacagtcataccttccgcttcgcgagttaattcataagtgccgtctggatgaatactcactacagggctggatattttaagattgccgttagtatcagcaatacagttatcattaaaaacagcaataggattaccgttatatttcaacttttcgccaactgtcagcctgccataatttttttcgttgcaaatatcaaaatccgatgagccgtcacctggaactccaatgtaggcagttctttttcctccctcaacaaactgaaaatatgcgtgtctacccgtgtcatatattatattaaaaatacccccggccccctttaaatttgccgacccggcatcaatctgccccgcaggagaaacagagaaaacccgattattattaatatatgccgccaactctcgaccaatggttaatttgctagattttttttcgttacaaatatcaaaatccggtgagccgtcactcgggaatccaacataggccgtcctttttgcttcctcaataaactgaaaatatgcatgtttacccgtatcatgggttatgttaaaaacccccgcatttccccttatattcgctgacgcggcttccatcagacccgcaggagaaacagagaaaacccgtttgtcattaatatctatcgcatatccgtaggtattagcactaccaccacgcacaataccggctttagcataattgtcataccaattgtaaagcgtatacgagactattgtacccgtcgatcttaaaccagattcagaaactaacatcgtcgcattacgttcggtgggcagtgtttcaacctgtttaaacctagcgttcccatttatattcgctgacgcggcttcaatcaaaccctcaggagaaacagaaaaaacccgtttgtcattaatatctatcgcatatccgtaggtattaacattaccaccacgcacaatacctgttttaatataattgtcataccagttgtaatgcgtaaacccgactagcccattttgcggtctggctccctgcaaagaaactaacatcgtcgcattacgttcggtgggcagtgtttcaacctgtttaaacctaaaatactgtggataattcccgccattggccgataccgcatttttcgccaattccactgtttccgataagccgaggtttttcacaaacccgctcttatcaggaatatctgcgccattttgattttttgccaatcggttattcgcattatcatttacatcagaaaccagtttctgcgttaccgcgagggtattactattacctattgtatctgtgagctggataacacctttttgtgttaatgaagcacttggtactgctattccgattttttgttctaatgctctatttaattggacaataagtttggctatatccccatcatccagaacatcattaccggaatatgttgcgataaaactagccacaacagatgttatggttgacgactgacgtaacgccttgtttagtaaatgaatcgtaatatgatctggtggaaatcccgtttttaaactctggctttcttcatatccttcttgactcaccacattagcattattactaatagaaaaagctttaaaatcatttttttgattcatatatactcctaaaattaaaaaaacatcatttcataatcaacatgttaaattcctgtaaaaataattcccctcaatttattttaattatagtttagcttagaaaaataataattgagccaatattacaacttaaattaccaactattttttataattgatagcaatgaaaaaccaaatgtcattaagccagatctatatcaaaaatatttccatccatttcctcacttgctattacaattgcaaaacttattaaattattttttacaattttacataatgaaagtcacttaacgatcgggaatcactgacaaggaagactcaatcaaactgaactttgtactcgtcgtacccggcaggtaaactatcctcctttttgttttactgccaaaagtgaagaaaaatagtgagtaacataaaattaatcgtcggtctggctaatcccggtgctgaatatgctcaaaccagacacaatgccggagcctggtatgttgatctactcgctcggagccacaatcaatcactgaaagaagagagtaaatttttcggttataccgcccggattaatatctgcggtcacgatgttcgtctgttagtcccgacgacgtttatgaatctcagtggtaaatctgtcgtagccctcgcctccttctaccgtattcaaccggatgaaattctggtggctcatgatgaactcgatttaccgcccggggtggcaaaaatgaagctgggtggtagtcatggcggtcataatggcttgaaagatattcagaacaaatttggcaataaccctaacttttatcgcttacgtattggtatcggccatcccggcgataaaaataaagtggttggctttgtgctaggcaaaccaccagccagtgaacaacagttgattgatgatgccattgatgaagcacggcgttgtactgatatcctgatgaaacaagatatggataaagcgatcaaccgtttacatagctttaaagccagcgtttgatgacatggaatctggaatcgataaatcttgtctgtaagatcgtgataacccgtcattccgtgtataatggcgccaatttttttgactcatcgaaaaggctgatacagccttttgatttataagtaaattaaggtgaaaatcatgggattcaaatgcggtatcgttggcctgcctaacgtcggaaaatcaaccttattcaatgcgctgactaaagccggtatcgaagcagcaaacttcccgttctgcaccattgaacctaataccggtgtcgtccctatgccagatccacggcttgaacaactggctgaaattgtgaaacctcagcgaatcttaccgaccacaatggaattcgtcgatattgcgggtctggtgaaaggtgcatcaaaaggtgaaggcttgggcaaccagtttttaactaacattcgtgaaacagaagctatcggccatgttgtgcgctgctttgtcaatgacaatatcattcacgtttccggtcaagttgatcctgctgctgatattgagatcatcaataccgaactggccctttccgatctggacacctgcgaacgggccattcatcgtgtgcagaaaaaagccaaaggtggcgataaagaggccaaagcagaattggcagctctggaaaaatgtctgcctcatctggaacaagcgggtatgttgcgggcgttggatctcagtaccgaagagaaagcggctatccgctatttgagtttcctgacgctgaaacccaccatgtatatcgctaacgtcaacgaagagggtttcgaaaacaaccctcatctggatgcggttcgtgcgatcgcagaaaaagagggttcagtggtcgtaccggtttgtgcggcggtagaagcggatatcgcggagctggaagatgatgaacgcgaagaatttatggctgaacttgggctggaagaacccggtttaaatcgcgttatccgcgctggctatcagttactgaatctgcaaacttacttcaccgccggcgtgaaagaggttcgggcatggaccatcccagttggcgcaaccgcaccacaagcagccggtaagatccatactgattttgaaaaaggttttatccgcgcacaaaccatcccttttgaagatttcattacttacaaaggcgagcaaggggccaaagaggccggcaagatgcgttcagaaggtaaagactatatcgttaaagatggcgatgtaatgaatttcttgtttaatgtctaatttatttttcatctctgacaacatcacaagatctctctgagactgattaaaattcttaaaatccacgcagttgcgtggatttttgttttcatgatgtctcaaaaaatatcgtaacagctcgggctaaatgcgtctgttacgggcaacgaattacaggttcaactgagcctgtattttttctatctcctttatccactgctgctgaagatgtggcttttggtgagcaatcttacgtttcctatcgatttccagtttttcttcaagataaaacaggcgctccagtaattgctcttccagcaataaggatggttgtaacctgtcatcagcaatgtgggaagcatagcggccatactctttgtgtttactttgctgctgactcatctgttcaatttgctgataaatagcctcaacatcgtgatactcttccaactggttgttattgataaaccaaaaacgctgacagctattttcgatcaaccagcgatcatggctaacaacaagtaatgcaccactaaatgtcgcaatttgctcacacaatgcttctttaccttcaatatccagatggttggtcggctcatccagcatgatcaattcatacttcgccaaactcagtcccacaaacagcaaccttgaacgttcaccaccactgagagtagccactttctgctgatggcacgagtaagcaaaaccggcaccaatcagcgccatcttgcgctgttcgtctgtcagtagtgcaaatggccgtaatgcatctatcaggctgtcgttatcatgcaattggtgtaattgctgatcgtaataacctgctgtaatggccggatggaactttatatcaggactgtggcgcatcgctgagagataacgttgccacaacagtcgcaacaaggttgatttaccacaaccattggcaccaatgatagcaatgcgatcaccactctttacctgatgaaagccggtggtaaacagtggtattgagccaccctgtactgttatggtggcatagtcaagttcaagaacgcgatcagcctgaataggctggccggttaatgtcaactgccactggtaaccttcagtcaatactgtctgcgcatctttcaaacgttcaatgtgtttttccatctgtttcgctttgcgtgccagatcttcgttatcataaatgcgtccccagtttgcaaggcgtttggcactggacgtaacacgatcaatctcgttctgttcaaactgatggcgatgttcatcactcatatctttttctgcgagagcttgacgggcctcagaacagggtaaacgataaaaatagagggtcttgtcgcgcaatatccatgtgcaattagtgaccttatcgagcagagtctgatcgtgggaaaccagaataaaactccctttccaggactgaagaaaattgcccaaccaccatagagtaggtaaatccagatgattacttggctcatccagtaatagcagatcaggctcctgtattaatgccctgcctaatagcagacgtgtgtgttgcccaccgctgagctgactggcaggttgtgcccacaaggtttcagcaaaaccgagctgtgtcagaagaatttccgcacgccagcgttctgtcacacgttcatcaacaggtaatttttgtaaaaccgcatcaattaatggctgattttccacgtcttccggtaaatgctgctcaatataggcagtcacacaatggctggcatagtgaatagtgccaacgctaggaagtagttgcgctgtcaataattttaatagcgtactttttccactgccgttatgaccaatcagaccaatacggtcaccagcctgaatagtgaaaaagacattattcagcaacatggcggtagatacttcgtaacagattgattttacagataataatgtgctcatagcttactcatttttcaggtacagagatacccgggttaagtcagggggcgacaacccagtaagctgaggaagagatttttttagataacttcgctcagacaggttatcgcagtgtaatactgtgaaagcctgagctctggcgattaccaaagaagtgtgaatattcgatcacatcacacaacatcataattagcctccttatttttccaaattgaacgatactgtcatcgtaacaaagctgtctatttacaggcaaacaataattaaataaaaataaccaggtatcaataaatttaatgactaacaggcggttatgcgttttttttagatattttggtaaaagctgcttcacgattaaaatcatgattcaaataaggacatatgagagttacctctttaaagcctttaaaatccacgcagttgcgtggatttttttattttattcttatggtttttctggcagttgtactcgaacgttaattactcgcccatcaggaatgtcgcataactcaccatcattgtaataaacaacttccccatcatcattaatactcttaacacgcttattttgcgcaaagatagcaataaattttaaactccctaaaaccagacatatattaaaaccatttctgtccaatatatgaaagtaactcttttccatccatttcatttcgaaaatatttataataacatttactttccaagaataaataaagcccaccatacaacaaaatattttaaccaagaagttaatataattgatcgtaattttaacttgtaattattcattccaaataaatataaatcaaaataaatcgacaaataattaataataaagcgcattattataaaataaaaaataaatatccgaataatataattcaggattattcaattagaacaaccaaaacacaaattttgcgataatggactttacatactatatttttacaccattattaaaagattagatatatatttttacctattgattaagatattctcggttttcaggaacattgcttatcatataaataaaaccctatattgttgatataaaacaaattatagtttctgaatctggatctcattttgagtaaagaatgaaaatcaattacttatctaatataccctatggatttcaagatggatcgcgacggcaagggagtgaatccccgggagcataatgtgaccggggtgagcgagtgcagccaacaaagaggcaacttgaaagatgacggggatgacgggtataagtatagatatttactattgacaatatgtaaagacgtgcatatctttatcttttacatttagtaaagaggtgtttgtatgccaatagttagccagaaaaggcaggtaacgttaccgcttgagcaatgttcgatagctaacattcagccaggtgatgagtatgagagtttcgtcagccgaaaaggagtcatctcaattgtcacaaagcgcaaaggggccgcgaaggggatattaaagggtatcctggccgatcaccaggtgagtgaagaagaatcacttgagagtgccatacacaaatgattgcggtagatacaaatattgttctcagatatcttctgcaagatgacgcgaaccagtctcaaaaggccaatgcactttttgaaggcaaacaaaaaatcttgatcaccgatgtggtcttagtcgagacaatttggacattgagaggcaagcgttacttgctacctaaagaggcgctgatagaagtgttgcacaggctcattgaagagcctaatgttgtcttcgaagatggtcatgcgctctggtgtgcgttggatgactacatcaatgccaaaccgattaaatgcggcggcaagacgaagcaggccgactttgcggatgcattgatagtgaataagtctcagcggtatggcataaaaaacaaaaaatcggtttcgccgctttatacatttgataaagccgccttggagatcgatggtacagaagagccttagaggaaaggcattatgctggagttagctaaagcccttgaaatccacgcagttgcgtggatttttttattttattcttgtgatttttccagcaattgcactcgaacattaatgacgcgcccatcaggaatgtcgcataactcaccatcattgtaataaacaacttctccatcatcgttaatactcttaacacgcttattttgcgcaaatatcggcgcatctctattttgacgatgataacattcaatggttatatcgccactggctgaatctaccaattcacaaacccaaataagatttaacccgttgctatctgccggaacaatagtaccaccatgaattccccattccccatctttagcaaaaccattgcagccgctgatacgatatttccctgtctctattcgcttgaccgtcaccccttccgcttcgcaagttaactggtaagttccgtctggatgaatatctaccactggactggaaactttaaggttgccattagtatctggtttggcgttgcttgttgaccagactttataccacggattccatttattgatgttaccgtcaccattgtgcgttctatagtataattcgctcttcggcaagtatgaggagtgaatcatcagctcataacccttaaaagtcccataccctcctgaaaatctcattccgggaccatgtacacctggaccatttaaccctactggatagccaaaatatgtcgaattctgaggaatgttatcaaaattatcgattgtagaagctgtattattcccaacaataaccggttttgtactaatcacttctaaagcgagattttccacaaaggcttttttatcaggaatgtctgcgccgttttggccttttgccaatcggttattagcattatcattcacatcagaaactagcttctgtgttaccgccagggtattactgttgccagttttatctgtaagctgagtaacacctttttgtgttaatgaggcatttggtacttcggtggcaattttttgttctaacgcgccatttaattgggcggcaagtttagcgatatccccattatccaaaacatcatcgccggaatatgtcgcaataaaattagccacaacagatgatattgtcgatgactgacgcaataccttattgagcaaatgaacagtaatattgtcgtctggtggaaacccaatctttaaactccggctttcttcatatccttcttgactcactatattagcattattaccaatagaaaaggctttaaaatcatttttagaactcatacaccctccaaaatcaaataatattattttaatttaaccaccgtgaaaatcattccccataattcacttcaatcatagtctagcttagaaaaacaataatggaatattcttacaacctaaattgccaactatttttataattgatagcaataaattttaaactccctaaaaccagacatatattaaaaccatttctgtccaatatatgaaagtaactctttccatccatttcatctcgaaaatatttataataacatttactttccaaaaataaataaatcccaccatataacaaaatattttaaccaagaagccaatataattgatcgtaattttaacttgtaattattcattccaaataaatataaaccaaaataaatcgacaaataattaataacaaagcgcattattataaaataaaaaataaatatccgaataatataatgcaggattattcaattagaacaaccaaaacacaaattttgcgataatggactttacatactacatttttacactattattaaaagattagatatatatttttacctattgattaagatattctcggttttcaggaacatatgcttatcatataaataaaaccctatattgttgatataaaaaaaattatagtttctgaatctggatctcattttgagtaaagaatgaaaatcaattaattatctaatataccctatggatttcaaggtgcatcgcgacggcaagggagtgaatccccgagagcatagcaaactatgtgaccggggtgagcgagtgcagccaacaaagaggcaacttgaaagatgacgggtataaatccataaaggaaaatagacatgaaagatatactcacaaattctgatcataaaattaaaactgtccaagagtggagagaatacgttaaacacagaggagaaaaatattctaaaacgcagcaacattcagataacatttttactcatttcttagaaattgagaatctttctgatatacaaagtccagccagtgtagccgcgacaaataaatacacactattcgccaagaaatcggccacatcaaataaatacccagtcagtgtcactgaagggctgcaaactatcattaacttatgtcgagtggcctcaggttatgacccgctggaaccggaaggtaatggcaatgcgcagaaattcacagcattcacagaagaaatagaaaaggttccctttctctctttactatgggcagacacaaatacgattactcaacaaagtcatgacacagatgtcttgatcgattcttttgttgaagcctttcaagggttatctcctcaggataaaattactattaagatttatttgaaaaagttgattcataccgctttatcatatgccgatcaaaaggaaaaaaaatccaatctggtgcaatatgctctgactaaaaccccaaatggggtgtcactcttactctattcttctatattgataataaagaaagtagataacaagggtactattaaattcacctctcattataatctttgccaggcagaatataatctcagccagaaaacgtgggaaatagtaagatcagtattcgagaaagaagataagataaccatagagtatttaattgattgtatgacaaccaaaatgaaagcataaactgaaaactctctgtcagtagattaattgatttatatacccgtaatcattgaagatgcttgattttatccgaaatggagatcattatcctcgctatgaaaatatttattacatcagaacaaaaaatcaaacttgaacgtcttcacgacaccactcgtgatggtcaggtacgagacagaataaaagcgatccttctggcttctgaagggtggagttctgtgatgatagcccaggcattgcgactccatcagaccaccgttgaccgccatatcagtgattaccttaatcaaggtaaacttaaatctgataatggagggtctgatagtttgctttcccgagaacaaactgattttttaatcaatcacttatctcaacatcttttccatcacacccatgaaatcgtggcctatgttgctcagctctggaatattacctttagcattcccggcatgaataaatggctacaccgtcagggtttttcttataaaaaaccttgtggcgtccctcataaattcgacgcagaaaaacagcgacaatttattgaatattatgagaatcttaaagtcacagcgaaagacgaacccatcctttttcttgatgctgttcacccgactcaaggcaccaaactcagttatggctggatgcgaaaaggcgagaaaaaaaccgtcaaaacaacaggaagccggactcgcctgaatatattgggtgccctcaacctgaatgccattggtcgtacggtgttccaggaatatcagaccatcaacgactacaacatttgctgttttttcaatgaaataagaaagtcttatcctgactatcatcaaaaaattcaccttattgtggatggagcgggttacaacaaagctcatcttgtgaaggagtgggcttatgttagcaatattgagttacattaccttcctccctatagtccaaatttaaacccgatagaacgattatggaaggtcatgaatgaacaggttcgaaataaccgttatttcgcggataaacatgaatttcgagacaacgtcttcaaatttttcaccacaacgctaccggatatagcggactcgctgatgtctagaattaacgaccattttcaggtgctaaaaactgcatcttgaagtttcttgggtatatcaataacattattaccaatatgtgctgatattattctcatcatagttattcaataaaaccattaaattaaaggagaatagacaaatataacataaagaatagaacatacgatcaatatatataaaaatgaattatctcaaaatgtgaatttcaaatcgataaatttcacaagcagtattttactattaatatgaaaatatcacataaaaaaacatttatccgtgaggaataagttaaattacatacccttaatatttgatagtgaaaaacatccacttatggatatacttagttcatacaaaaatatatttaacacttattaacaaaaatttaaaataaaaattaccaagctaaaaaaacagtaatattaagtacatgattatcgatttatctcactgttaaaaatagggttcaacattgttccctactttcaacagtaccctaacattcaatacttaacttaatataccctatggatttcaagatggatcgcggcggcaagggagcgaatccccgggagcatatacccaatagatttcaagttgcagtgcggcggcaagagaacgcatccccaggagcatagataactatgtgactggggtaagtgaacgcagccaacaaagcagcagcttgaaagatgaagggtatagataactctgtgaccggggtgagagagtgcagccaacaaagaagcaacttgaaagataacgggtataaatctattaaggataaaaatcatggaaaatatcttaaataatcctgattatgcagttaaaaaagcccaagaatggatagaacatattgaaaaaggaggcacaaggctccttaaagattgggaacgctcaggtaatattattatggagtatcctgaggctggcgattattctgatgtacagagcccagcgaatggcgcagctacaggaaattatacccagttggcaaaagattctgcctcaccctctaaaaacccactcagcattaccgaaggcttgcaaactgttattaatatgtgccgtgcggtttcaggctataatcctttagatcctcaaggccaaggtaataaaaagaatttcttctcatttacagcagaattatctggcgttccattcctttctttactgtcaacaagtacacaaaatgttattcaaaaaagccatgatgccgatgttttgatcaactctttcctggaaaacttcctaggattatcgagtcaggagagagagcagatgaaaaccccactgagacaattggctatcgctgcattatcttatgctggtagaaggcaaactcaatccaatttcgtacaaagtgttcttgctacatcaccaagaggtggcgtgtcattcttcttgtattggtctgagttttcaatcatcgcttacgaagatgataaaggtcttatcgaattcaaatctcattacttcctgccacaagcagaatataacctaaggtacgaatcatgggtaaatgtaaggcccgcattcgagaaagcacagaaggtatcattagaagattggattgacagtatgaccactcggagaaagcaaggaagtaacgtaagagcgctttgtatagaataatgtataccttatagattttaagatgcatcgcgacggcaagggagcgaatccccgggagcatagataacgatgtgaccggggtgagtgcagccaacaaagaggcaacttgaaagatgacgggtatagtgaaataacctcaaaatggtgtcggcaaaagcgttgtggacaccataaatttcatatgtgatgagggcgttcagaatccctcacgttcttgtactggcggttggtcacgttctgtcaagaaatctgccgtaacaccaagaccatcaaaccaactgtcccaagactcaccagccatatcaacctgtctcacaccttcgggaaaaccacgactttggaaagtcggacggcttacttgagaacggttacttttaaataccgttgctttctccacgaacttctccttgatagggattaatatcagcctgggatcaggctatttcaaccaataatgtatgacaaatattgcccaaagtctgcatcgcacgttccatttgctgattccaatcaaaagaggcattcagacgaaaggcatggttaaactgttcgctggtgcaaaacatactgcccggtgcaatactgatcccttctgccaatgccagttgataaagccgctgtgcactgaacagaggctcaaattccaaccagagaaaatagccacctttagggcgattcactttgactgaagcaggcatatagtcaccaattgctcgtaacatcagttgctgacgttgctccaatatgcgacgaaggcgacgtaagtggttgtcatatcccccctccgcaagataatcagcaattgccaattgcgtcggcatgctggcagaaacggtactcatcatttgtaactgttggattttcttggcatgttttcctgctgccacccaacccacacggaatcccggggccagacatttagaaaacgaggagcagtgcataaagttgttttcactgtctaaccctttcgccggtacaggccgttgctgatcgaagtagagttcaccataaacatcatcttcaatcagcaccacctgattactgttcaggatattcaccagccgtaatttactttcagcggacatcgttccccctagcgggttctgaaagtgagtcattaaccaacaagcttttattgggtatttctggatcacctcctccaacgcatccaaatcaataccgttttgtggatcagttttgatggctaccgctttcagacgtaaacgttcaatggcctgtaaagcaccgtaaaaagccggtgattcaatcaccacccaatcccccggttctgtcaccgactgtaaactgaaactcagtgattccatcgcacccgcagtgatgacaatttcatcaggagggacatgaataccatgcattgcataacggcgcgatatgttacggcgtaacttatcattacccggcggtaaattagctaaagcgctatgtggtgctattcgtctggcagcagccgctaacgctttggaaagtttaggttgaatcaataaggatggatctggaaatgctaaaccaaacggaataatcgcaggatctttgcacgcctgtaatacatcaaaaatagaagcgcttatttccacgctttcacttaaatgtaatcgctttcccccttttgctgcggcaaagggctgcaaacgtttagcgacgtaataacccgattgaggccgggaaatgatccatccctgactttctagtaattgatacgattgaacaacggtcatcaaactcaaacctgataacttcactgattccctcaatgaaggtaatctatctcccaccagccaggtaccatcttcaatatgttgaagaatttgcctggcaaattgttcataacgcttcatcaattcagacctctccgcaaactgttatagtcaatatacagaaaactgtcactattatagtcatttttttcatgctttacttgtccgcatacatttcctgcctttattcaaactaaaaataagaggttactatgtttggtttaagtgccttggaactggccagaattcaattcgcgtttaccgtctcgtttcacattatttttccggcaattaccatcgggctggcaagttttttagcggtactggaagggttatggctgaaaacgcgtaatagtgattacaaagtgctatatcatttctggtcgaaaatttttgctgttaacttcgggatgggcgtggtttccggtctggttatggcttatcagttcggtaccaattggagttttttctccgattttgccggttcaatcaccggcccattgctgacttacgaagtactgaccgcgttctttcttgaagcgggctttctcggcgttatgttatttggctggcatcgtgtgggtgaaaaattacatttcttcgccacctttatggttgcactaggtactctaatatccactttttggatactggcttccaatagctggatgcaaaccccgcaaggtcacgaaattgtcaataatcaggtcgtccccgtcgactggctggcagtgatatttaatccctcctttccctatcgcctggctcatatgtctactgcggccttcctcgcctcagcattctttattgcagcttccgcggcatggcatttattaaaaggcaatgactcgacagcaatgaaaaaaatgctatccatgtcgatgtggatgatcttgattattgcgcctttgcaggcattgattggtgatgctcacggtctcaacaccctcaagcatcaacccgctaaagtcgcggcaatggaaggccactgggaaaatcttcccggtgaagccacgccgctgatcctgtttggtatcccggatatggcgcgggaagagacgcgttatgccgttgaaattccttatctcgccagtctaatcttaactcacagtatagataagcaggttccggcgctgaaggagtttccaccggaagacagaccaaacgcgcttatggttttctggtcatttagagtgatggtcggcctcggtatgttgatgatagttgccggcttttggggactttggctacgctataagagacgactttatcagtcaaaagctttcctgcgttttatcttcttaatggcaccttccggcctgatcgccattcttgccggttggtttactaccgaaataggccgtcaaccgtgggtagtttatggtctgctacgtaccaaagatgcggtatccgcacacggtgaaatacatatgaacatcagtttgttgcttttcatcgcggtctacagctcggtattcggtgtgggttacgcctacatgatgaaacttatccgcaaaggtcccaaaaaggagttaaacaatgggtattgatctgccgttaatctggttcatcatcattgtgttcagcatcatgatgtacattgtcatggatggttttgaccttgggattgggctgctctatcccacggttaaaagcgataaggaccgtgatttaatgatgaacagcgttgcgccggtgtgggatggtaacgaaacctggttggtgcttggcggcgcaggtttattcggtgcttttcctttggcttatgccgttatccttgatgcattaacgatccccgtgacattaatgttatttggcctgatcttccgtggtgtcgcctttgaatttcgtttcaaatgcgcgcctgagcatcgtcatatctgggacaacgcttttatcagcggctctgtgatggcgacgtttgttcagggcgtggtggtgggtgcctttattcaagggttcccggtggaaaaccgagcttacactggcggctattttgattggttctcacccttccccctattttgtggttttggcctgataattgcttacgcactattaggctgtggctggctaattatgaaaaccgaaggtcacctacaacaagagatgtaccgtgtcgcccgcccgctcacttttctgatgctgacagttatcgccattatcagtttatggacaccattcattcatccggcaatcactgaacgttggttcagcttacctaacctgttgttcttccttcctgtgccactgttggtggtctggtctggctggaaactactgcactccatcaaacgtaaagctcattacacaccgtttctggtcgcactattgttagttttccttggctacagtgggttgggcatcagtatctggcctaacttgatcccaccgaccatcagctatgaagccgcggcagcgccgcaacaaagtttaggttttatgctggtcggtgccctacttatcatcccagtgattctggtttacacctattggagctactacgtttttcgggggaaagttaaccatgaacaaggctaccactaatcaaaacaccccacgcccttctgtatggaaacggataggctggatggcaatgatctggttatgcagtgtgatggctctttttgctgtttccacactatttcgccttctgatgacagcagcaggtatgaaattgaagtaattattaacactatttaacaaattgagctaaagttttcatcagtattgcagaacggaatcttagcctgatgaaaacaagttcaaataacaccatcttcaaaaaccaaaaactgtttgtaatcaactctattataaatttgtttttactttttatactgttgttgattgataaaccgtcgattccagatttaattttaccgttattgataatgttaagtattacaaatatctacttcctgataaaagtggtacataactctgctcctgtcaaagaatggcaacatgcaagatacaaagcagaaattaacgcactgaaacaaaaaaatagctatttggattttctctgtcaaagccatttcaaactacaaaattgtaaactgctacctgaaaagcttcaggagattttttctcacctcaatcgtctgatccctttctgtgaagccaaaatcatcttttatccatcacaacaagaatatttctttcgcaatccccatcaatgtccctattttgatatgccgctgattatgagatggaatctagatgataatattgatagctatgggacactctggataaaaacacacaggaatagtgatctcactcccgatgaaaaaagtctggttcaggatgtggtgacgttaatgacaaataaactattacgggaaaatcagatccaatgccaacaccagagtatgttggccgcagagagaaccgctatttctcgtgaactccacgattccattgcccaatccctctctttccttaagattcaagttaattgtctatatatcggcagtgataatttacccaagcaaagtttaacctcgttgaatatgattaaagatgagttaaatattgcctatcgccagctcagagaattactggcaacgttcaggaacgaacaacctcaatgtaatctacaagaatctttacagaccttgattagtgaatttaaccatcgtctaggcttcaacattgaattcaattaccgcctgacacatcagcacattcctgacagttacagcaaacatttgatacaaatcattagggaatgtttgaacaactgttataagcatgccaatgccaattggatcagtatccgtatttatcctatcgatgacaaaatcattaccgttgtcagtgataatggtcagggtatcaatctggactccgctaataaaaacaaatttgggctggctattatgcaagacagagtttctatcctaggtgggcaattacagataaaaaaccgtaaacatggtggtacagaggtagaaattcaattttcagtggattgaaaaaggcagatcaatcccattatcgacggcagcgcaatttatttaatgataataattatcattttcgttaattgctgttacactaactttggctttatcagataataaccttcggtaaattttccagaggaattttacgtgaccaataaaacaattgaagaaaaaaacatttaccgacctgccccccctagacttgttcaggtgaaaaacattttcgacgtgacacctaatatgcgcagcatgactttcaccggtgaatgtctggatagttatcccacggaatgtgaaggcggacacctaaagatattcttaccgcttccgggacaaactaaaccggtattaccgactttatcgccagaaggcccgatatggccgccgagtgaactgcgtccaataacgcgcacttactcggttcgagccatccgcaccgaacaaaaagagatcgatattgaatttgcactacatcacaatggcggcccggcggtagaatttgcttatagagcccaaattggtgactggatgggtattactaaccccggtggacctgatccattactgccaaaagtcagccactattatatggctggcgacccaagttctttgcctgctattgctgcgctattggcaacagtaaaaccagatgcaaccgggcaagtcattattcgtatcgaaagtgagcaagatattcaggaattaaaaaaaccggcaggaataacagttcactggatcactggtgacgttgaaataactgacacaatcgtatctgaattcaaatcctggtcattaccaacagaaaatgtcactttctggctggccggtgaggataagctggtaaaagaacttcgtcactatattcgccgggaaaaaggctatgaacgccaccagctatatgccattccttattggaggcatggctttgatgaagaaggttatcatgccctgcgtcatgaagtggtggatagcgacgattaatggccttacatatttatacccgtcatctttcaagttgcttctttgttggctgcactcactcaccccggtcacatagttatctatgctcccggggattcgctcccttgccgccgcaatgcatcttgaaatccattgggtatagataatgctgtaggaagaaaccaaaatacccaagatctcggtgactaaaaaaaggaatgggttgaatatcctaacgggcgaattgaccttcaccgccaaacgatagactactggaaaataaagtagttctatcagaatttccaataaaaatcattggccgtcagtcagcaggaagaaaaagggaaactggctgaagatcagagagttaaaatataccgaataatcagagaatatgctaaaagatcacaccgtgaggcgctcttgcaaaagcccccacggcatatttccatcggttatttacaataagccagcaacgttttctggcacaattgagaacgaacacaatcctcttgattaaaatggataacactgacgacttcatcatctgaaaatcttcccagtgcatcacgcaatcctgataccactcccactggcaaatcacattgacttatatcaccatttacaatcacagtaacattttccccaagccgggtcagaaacattttcatctgattaaccgtgacattctgggcttcatccagaattacaaatgcattttcaaatgttctgccccgcatataggcaaaaggcgcaatttccactttgccaatttcaggccgcaagcaatattgcaaaaacgatgcgcccatacgttttaataaaacgtcataaaccggtcggaaataaggcgcaaatttttcagccatatctccgggcaaaaagccgagatcttcatccgcctgtaatacaggacgggtaacaatgattctatcaatttccttattaatcaatgcatccgcagccattgccgcactaataaacgttttaccgcaacccgcctccccactggcaataatcagttttttatagtttattgcgcgcatataacgccattgcgtttcagtccgtggcaaaatttccgaagtatcccggttatcacgtgccataccaatagcttctacgccaccgggttgcactaaagaggttacattatcatcccgataacattgatggcgcaaatcccttttcatcatccgttttgcctctcgacgcgatttaatcactgctttctgtctactcatagcagtatcaccttatcgttgttttcacccatgcggtgtcatatcaccgatacaatcactacgttatttcaagcctcttttccgcttatttagccccatagaaaaacggtagtggaaccgccacatatattaatgaccttgatattcccgctagctcgcatatgatcggtatatcaatcattaacactactcaccattatttccatttagtgaaaactaacgaatcattatgacagtataatgacaatctctgagttatgacaaacaagccaaggacgctcaattaaaaataatcgacagtatcgtttatttagttttgcgagaaatttaattcattgaataatatgacttaatataagctaatgacttaacatcatagtagccattattgatttgactaccatggtattgatacatccagctactatccggcaaagaagtcactatctgaaagcactcttcttcaccggatggcaataatattattattgatgacaacagagcaaatagttaactataccctattgatttcaagatgcatcgcggcggcaagggaacgaatccccgggagcatagataactatgtgaccggggtgagtgagtgcagccaacaaagaagcaacttgaaagatgacgggtatatctgttttattaagtccccttacagtttccagccaaccgaaaacccgcatttcttgcttcaatttctgttttaaaatagaccgagttcttctcctgaatcaccttataacctgaacaatgagaaaaatggtagattttgctgttgttattccctttaattaatcctctagaggatgaatcagataatacccgttgtttctgggtatctgtttgactatttctctgcccttttatctgctcgctttttggaatgccagaggcggagtttttatgccataattgccatttctgttcaccggtaacaaaagggttatgatgccccataataccggtaattcggttatctctctcccgctcccatttactcggtggatattgacgatcccaggcgataaatagctgctgttgttggcgagacatggaaagattgtaacgatcgtgcatataaaaattgatccgagcgacctgcccttttacttcatctctcggttcaaacgttcgagatttaaaatcaactttactggtacaacgaccataattattcggcatattttttggtaacattccataactgaaattactacgatcgccattaacctcgccaattgatggaaccaaattatgtatatcagattccattgccctaaaaacaggatcggaagagacacaattcttcctccctccattccgccaacattgccgctgatgaccaaaaacccaggcgggaacaatatgttcccattcaattcgttcagcacgattctgttgtgacctgacttgataaccacacgaagaaaggattgcgcgtccaccgctcttacctgtccattgccaatcgcaaccacagtaaaatgtcccttcccctgacttaaattgatcatggtatatgcgtttacgcaattcaactttagcttgttcaaaagtagccggtgcggcaaaagaagataaaggagcaattaaactgaaacacccaatgtgaattgcccaaaaaataactttacgtttcaatgataaaccctacttatataaaaataccattctgattttaaccttttatgttgcctcataatcgacctataagacaaacattgtttctttgcatttcttcttagcatctcttttaaaaagaaaagctattcaatgaacaggttgagatatcacaaaatggcagttatcctattattgaggaatggatacagggccgatatacggccccgccttactgcaatttactaccagaatcatttattagcagaagcgctggtactctccatttcttcctgtaacctctttcgattcaagttccagagtgaatcttctggcatttggacccgaatatctaaacggcaagaatcgggaatatcacagggctccccatcttgatagaatatcttgttaccactgtcatcaatagatttgagtcgccaattttggaatctctccggtaaatgcgtatgttggcgatggaaagtctcaataataatagagccgtcagactgaacctgatcatcaacaaaaatcagttcgagattattattgtcgcgaggaacagaaatacccccattaacaccccaaccaccatcagcgttatagcccaagatatttgatatacgatatatgccggttccctgttttatcacttctgcaccttcagattcgtcattagtcgagaatgtgccatcagggtagatttctattaccggggaggctaccttgaggtttccgttggcgtctggcttagcatttatatcgtcccagaatttacgggtaattttgtaatctaaatttatatgatctgtacgatatgtatcgcttccatgaacaaaaattagcctatgactccatacttgatctattccttcacttgatggaccatttatattgctaaatcttagctgaacgccaaaacgatcagatggcagcccatatcgagtgaggaacggcgcattcggtttaaatccagcacaaccattgtatagattttcccgaccatccaaacgatcaatattcattgaatacattgcatcattagctagtaccgcacccacatcccccgcagtcagattgatatccccagtcaacgccttaccgtttattttccggctattaggtactttggcattaatattttcacgcaacgaattgattatttcctgaaccagcttctgcgtcacagccagtgtgtcattattacccatctcattggtcagttgaacaatacctttttgtgttaatgaggcactgggaatttttgctgtgattttttgttctaatgctcgatttaattgcgcagtaagtttagctatatcaccatcatccagaacatcatcaccagattgtgccgcaataaaattagccacgacagaagctatggttgacgattggcgtaatactttatttaacaaatgggtaggaacatcatttggtggaaacccactcagtaaatccctactctcttcatatctttcttgactcactacattagcattattactagtagaaaaagctttaaaatcatttttactcatataccttccccaaattaaataatgttcatttataatcaaaaatattcaacatcttaaaatatccttgttgatcactcaccatttttaaagaaaataaattcaaaatcgatcaccaaatcaactttacgaaccagagttcatttttatatggacttttatacgaatttctttaatcaaagcactgattaaaaaaccagtgccttgtgaatgtctgaggattataagacattaatggtattattcttgcggctgttcaggccaattaatatctggtgccgatgaaacatcaacccgacgcaataataccaaatactttttccaatctaacaataaagttttttcctcttccgatgccatttcagtttcaactgcatattgcaatacagtgatggcttcatcggcttgccgacgaaaaatagcccgttgttgctctgcctgttcaatttgactgactttttgagcttcaaagtccgttacccatttttcaccatcccattgatcaaaatcggtggacggttgctcgaatgttaatatttctggcaattcacccagtacagtcacttcttcctgtacacccgcttgcgtgttgtaagctatttttccacggtggtccgggacaatttcccaataacttccatcctcactgcgacgcacagccatatcatcagaatcggacaggtttggtgcgtccaaataagaatgcgctgacaaacccacgccttccgcaacatattcgaaatcagagccagagaattctctcgtataggaattagcatgataaacttttatccagccagcttgaattgctaatccgtcttcacctaatacagcggtttcagtatctaaaatattttcttgtgtcattattattctacctttacgatattattctgcttttacgatatagttaaatgcgatattacgggggcgggtttcatgaccgcctgtattgttagcaattgatgtaacagtggcactctcaagaacatcacgccccagcgggaactggtatctatctacaggaccttgataactagaaagaaattgcccatcagggagtcctttcgtaagttgtattctttttgtgttgtcagtctgtgcgcttaaaataacacggccactatcaacacctcgcccatcatcccagccacgaataaactcgcctcttaaatcgggtattctgccatcaggataagcttctgctaacttcggatactgtgatctactaaaagcggaaccattacaagtgaaataaccggaaggtggatgggacaacggccaaggaataggagagccaacgggaatactggaaatacctgaaattttttgctctaaagctttatctaaagccctattgaatcgtacagtaagtttagctatatcaccatcatccaaaacatcctcacctgattgtgtcgcaataaaattagccacaacagatgatattgttgaggattggcgtaataccttatttaatacatgagtagaaacattctcaggtggaaatcccgtctttagattctgactttcttcatacttttcttgactcactatattagcattatcactaatagaaaaggctttaaaatcatttttttggctcatatactcctctttaattcaataatatcattcagtaatcaatatattaaattttcgtacagatagcctctctcaattgacgctaatgatagtctagttcagaaaaataataatgaaatttattttataacttatagggttaattatttttgtataattgacactaataaatcacccaacacactgcaataaaacacatccagattatttgcatttatcatcttttactttatctttactatttataactaaaaatcttcatgaaaatatttcatacctttattaaaacaaatgaaaaaataatagtgacaaaaagttatttcattgaaaaataaaaaggccacactacagcgtggccttaagcaaggtaactcaccagtaaaaatcattgtttttcagcgaacaataacctgtaaattccccctccaacaatcccaccaataattggcatcacccagaaaaaccacaactgctctaaagcccaggtattctggaatatcgcaacagccgtgcttcgtgccggattgactgacgtgttggtaataggaatgctaatcaaattaattaaaaccagcgccaaacctattgctaatggtgcaaaacccggaggtgctcgtctatctgtcgcaccaataataacaattaagaaaatagccgttaaaacaatttcagctacaatagccgattgaagcgagaatccacccggtgaatgctcaccaaaaccatttgaggcaaagccactcgtggtcgcatcaaaacccacttgcccactggcaataacatataataccgcagcagcaagaataccaccgataacctgagaaataatataaggaataacttccactgccctgaaacgaccaccagcccaaagaccaattgttacagcggggttaaaatgcccgccagaaatatgcccaacagcatatatcatcgtcaatacggttaaaccaaatgccaaagatacaccgacaaaaccaatccctaattcaggaaatgccgcagcgaatacaacactaccacatcccccaaaaaccagaacaaaagttccaagtaattcagccgctaattttcttaacatgttttgtcctcatccagatatcaaaacgagttaccttgctgaaattaactatagccaataaattaaaatcatgcttatttttactataaccgcataagttgctgattcttgtggcatctttgtctgatattcactttaatccgggatttaatgcaacatctatcctgtgcagatcaactttttggtgaaaaatggatagcttaaaatcaattatcaccaaaataagttcaatattctgttctaaaaataggatgatccgatgcaaaatatctgcaccggattattacatcagtattaaataacacaatatctattaagcaatgagtactatacccgtcatctttcaagttgcttctttgttggctgcactcactcaccccggtcacatagtttgctatgctcccggggattcgctcccttgccgtcgcgatgcagcttgaaatctataaggtatatgtgaaaacgggttttttcactgctaaacaaatcattcatctgactaccaaaactgaaatatttgcatatccgacaattcctgaagcatttgagcctaataaatgggtggaaatattaggccgccgggaaccaacaacaattaaatctgctttaatctcatctgctgtcgataatactttatccctcggtgatccacaggctacggagaaagagactcgctcttttggcaaatctattttttcagccacttttgccaattcctcttctgatcttgcaatagatttcttggcaaaagagttgagcaaatcataatggtaactataactaattgaaaatcttgatatatcaggaacggcatggaaaagatgtatattagcatcagacaacttcgccaaatactctgcatgtgcaatcgctttatcggtcaactcatcttctgaaatatccaccggtactaaaatcgttttgtacatacgtactcctatatttatatactcgtcatctttcaagttgcctctttgttggctgccgccgcgatgcatcttgaaatccatagggtataactatttcaatgagtgtataaaatattacattatttgttgtgaattatttaactaaatcaaataaattaccgtatcgctctattttcaatcactcagagtcaagatgccacttatgtaatattcgatgaatgaaaggtgttacaacaagccccaaagtaataaagaacacactttccaaaaataccccatatatggcaataaaatatttaccggataaactaacaggaacgggatctaacccctgcgatcccagcataaataaagcgttaagcaaagattcagaaaatgtatgctcttctatcaggtaaaaccctaggacacccggaattattccaataaagaaaaacgttgcagcaataaagtaaaagcgtatcacccgccatacaaaatggtccaaacgaatcagtttatcagtaaatttttccacaattattgcatcctcaacaattctacaaaaccttatgcaatctcaatgaaaatgaaatcagagcaaatttaataaaaatagtgcaacccagcgttagctagcaaaccacccgaagatggctagccattatacccgtcatctttcaagttgcctctttgttggctgcactcgctcaccccggtcacatagttacctatgctcccggggattctctcccttgccgtcgcgacgcatcttgaaatccataaggtataaccaccttacctgataaccaaaacagatgttgtcgaatatttgacaacacctgatgcattagatcctaataagtgcgttgtaatattgggccttctagagccaataacgataagatcagcattaatttctgtcgctgctgctgttatttcatctcttggcgacccaaatgcaatagaataagataacctgtcagcaggaaaatcgatggcatcaatcagcgtttttaaatcatcttcggctttaattgtcgctttatccttaatttcatcatatcccaacgaatatgcgttaacaatcgcggatgaaattggcagtacatgaagaatatggagcttcgcacccgtttcttttgctaaagacagtgcatgcttaaccgctttactcgttagttcatcttctgaaatatctaccggtactaaaatagttttgtacatacgcacgctcctatatttacataccaaaccagactactacatttagtatacactatatcctgttaattactatgagttactgcctatctcaatagggctattttatttgcccttctttgccataaagagcgaacctgggcagtgctcaaaatcctcacgtactacgtgtacgctccggtttttccgcgctgtccgtgttcaaactgcctgcaacaattacgcctattgagataggctcttattcaactatatatatttttccaaataaaaattttatgaaaataggtgctgttcatttcaatacgtggcaaaagtgggatatgtacaggggcaataacattaacccctgagactctacctcactgccgatataacgcttttatttgctgaacggtattttcaaatatcttggcctgtttttcatcgcccatttctgcaataacacgttccagattcagtacaactctccctgcatgagcttgtcccatagttttaagaatagaggccaacagaactttcaaacatgtcacctctgttgccaaggtttcagtatcagatgaaggaattaaatcgattttattcatagtcgttacctgtttacgtattaattgcgtcatgaaaataataattataccacataattcatcccctatttttatacattttccaaatagatctacgccaaaaaacgttaaattgttgttaaaatcatatattttataaatatttatttagttattaattttatcataatcagaatatatgagatattatgattgcaaataaataatacttcctatcgtataaaataattctcttttgtctttggaagagataagtataatattcacattcctgatgaactttaaggataatttatctattctattgttttatataatctttaccaaaagttaaaaaacagacaattgaagttaacttttctgaaacaaattcaatacacaagcaatatcaatgaagctcatgtatgagcatagagccagttggagacacttttttgataaatgttttgttagtcgatgatcatgagctgatcagagttggtgtaaaacgtattcttgatgacgtaaaagggataaccgtagtaggagaagctaattgtggtgaagatgcgataaaatggtgccgagctaataaagtagatatcgtgttaatggatatgaacatgccaggcattgggggcctggaggcaacaaaaagaatcctacgctattgtcccgatgtccgtgtcatcatgttgactatctatactgaaaatcctttgccaatgaaggtgatgcaggctggtgccagaggatatctcagtaaagcctctacccctcaggacatggtaaatgcaattcgtgcagttaatgccggccagcgctatatcgctcccgatattgctcaacaaatggctcttagccaaattagcccacagcaagacaatccattaagttgtctgtctgatcgtgaattacagattatgctgatgatcacgaaaggacaaaaagtgagcgatatctctgaacaacttaatctcagcccaaaaaccgtcaatagctatcgctaccgaatgtttagtaaactaaatatcaacggtgatgtagaattaacacatatggcaatacgttatgggctattcgacacagagagtctattaaatagtgacggaacaatttgattcaaaaacatttttaaaaacagtaaccagtcaacctggcgtttatcgtatgtatgacacctcaggcacggttatttatgtcggtaaagccaaggatttaaaaaaacggcttgccagttactttcgcgcacaagtcaccagtcgtaaaaccgaatctctggttaaaaatattgttcagatagatgttacggttacgcataccgaaaccgaagcactgctgctggagcataattacattaagctctatcaaccccgatataacgttttactgcgagatgacaaatcctacccttacatttttctcagcgcagataaacatccacgactggcaatgtaccggggagctaaacatttcaaaggtgaatatttcggcccatttccaaacactcatgcggtacgggaatcattaatcttactgcaaaaactttttcctatccgacaatgtgaggatagtgtctaccgcaatcgctcgcggccatgcctgcaatatcaaattggtcgctgccttgggccttgcgttaaagggttggtaagtgaagatgaatatcagcagcaagttgattatattcgtctgttcctttcaggcaaagatcagcaagttttaaccagattaattgaacgaatggagcaagccagccagcaactgaaatttgaagatgctgcaagataccgtgatcaaatccaggccgttcgtcaggttactgaaagacaatttgtttcaggaacagacgatgacctcgatgttatcagtgttgcctttgacgcgggcatggcttgcctgcatgtactgtttatacgtcagggcaaagtactgggtagccgaagttactatcctaaaatcccgacagggacaacgcttgatgagattgtacaaacattccttggccaattttatttacaaggcagccaaaatcggactttgccctcagaaattttgctggattttactctgccagagaaagacattttgtctgattctttatctgaaatatccgggcgaaaaattcatattcaaacccggccccgcggagataaagcccgttatctgaaacttgcccgcacaaatgcaacaattgccctatcgacccgcttatcacaacaatcaactattcaccaaagattagactctctcaccaaattagttaagttagcaaaaattcagagaatggaatgttttgacattagtcacactatgggagaacaaactgttgcatcctgtgtcgtctttgatagcaatggtccactacgttctgaataccggcgctataatatcagtggtattactcccggtgatgattacgctgccatgaatcaagtactacgccgtcgatacgggaaagcattagatgagtcaaaaattcccgacattattttcatcgatggtggtaaagggcaattagctcaagcaatcgatgtctttcagtctcttgatgttgaatgggataaaacgcgacctcaattaataggtgttgccaaaggcagtgatcgcaaagccgggcttgaaacgctatttttcgcaacggaggataaaagtatcgcattaccgccggactctcctgccctgcatgtgattcagcatattcgtgacgaatcacataatcatgcaataaccgggcaccgtcagcgtagatctaaagttagaaacaccagtacactggaatctattgaaggcgttggaccaaaacgccgacaaatgttactgaaatacatgggaggtttgcagcctttacgtaatgcaagtgtcgaagagatcgcaaaagtaccgactatttcctatgcattagcagaaaaaatttataatgcattgaaacactaagtacattgatgcaccatacttataaattccactatagccagatagttaagaagcactatgcaattaaatataccaacatggctcactctatttcgtatcgccctgatcccattttttgtcctggcattctatttgccattcacatgggcgccgatggtttgtgccataatttttattgtcgctgcggcgacagactggtttgacggttttctcgctcgcctttggaaacagacaactcgctttggcgcatttcttgatcctgtcgcggacaaaatcatggttgcggccgcattagtcttagtttccgaacactatcatacatggtggataaccctgcccgcagcaaccatgatagcgcgtgaaattatcatctcttctctcagagaatggatggctgaattaggcaaacgcagtagtgttgccgtttcctggatgggtaaggtaaaaacgacagcacagatggcagcgttaattgctttattatggcgccctaattttgaattcgaattgggtggattcatattactttatgttgctacggtgatgacattttggtcaatgtttcaatacataaatgcggcttggtctgatttgcgtgaagcttgatcgaaatgacgtaaaaaccatcgaacaaacacggtgtaacaataattgtgttgactcgatacgtgaagtaagtagaatgcaacgcatcgaacggcacatgagatttacgaaaacaaataagtaaatcagctagttcaaagcggtgcgggaatagctcagttggtagagcacaaccttgccaaggttggggtcgcgagttcgagtctcgtttcccgctccaacttactgttcagaagttggatgctgaattagtcgttgaatatagaaaggcgcgttggcagagtggccatgcagcggattgcaaatccgtcaacctcggttcgactccgggacgcgcctccaaattcagcccaggtggtgaaatcggtagacacaagggatttaaaatccctcggctgtaaggctgtgcgggttcaagtcccgccctgggcaccaaatgaaattcgctgataaaacagtgagttagaaaaaagaaaaggccaccgcaaggtggctttttttatgccggcccctccccttcctaacatgctttcctaacatcgctgtggtgcaatgaataaatattcactaaaagcgctcaattaatcctcttttctaatctgcctgtacggcagtgcaccgcccactctccctttgtgtgcgggagaagtttttctaagctgcctgtacggcagtgcgcattacgggtctgactatattcaaggatttctatttctaagctgcctgtacggcagtgcaccgcccactctccctttgtgtgcgggagaagtttttctaagctgcctgtacggcagtgcaccggtcacgccattgcttcagggagttttcaaatttctaagctgcctgtacggcagtgcacatcaccggcattgttgccgttcgtcggcatcatttctaagctgcctgtacggcagtgcactaaccctcactatatagaagagtgcaaacgtatttctaagctgcctgtacggcagtgcacctttaaagagtaatgataagcaggaaattacgtttctaagctgcctgtacggcagtgcactaaccctcactatatagaagagtgcaaacgtatttctaagctgcctgtacggcagtgcacctttaaagagtaatgataagcaggaaattacgtttctaagctgcctgtacggcagtgcacacttaatgctttgccattaattttccggctgttttctaagctgcctgtacggcagtgcacttgttacatattaaccccaacctattgaatgttaaagagcaaccatgataaaaaataaaaaacccttttttgtgggataaacaatatttacttaaaaatcaataaattaaaatttgccgttaaaaaagggtcaaaattttttccatccaagtagaaagcagtctcttcttctatttctagctatcaagcgtatttttgttcagccattacgccgctctcactatgtaattaaatgctatgttgcgagggcggttctctgaggctacaggaacaacccttgacgcctcgaacccaaagccgtatggagtatctgtgtcagaaatatttatcgatttgaaactgccatctgtcgctattccaagaacttgactagcataaaaagcccctcttgttgccaaatgataatttagtgctatcatgccggcgaacgaaccctgaatatttcggatagcatccccctgatgcgttaaaattctacggccactatcaatacctcgtctatcatcccaaccccgaataaattctcctctcaaatcaggtaagttaccatcaggataagcttctgctaatttcggaaatttcgacttatcaaagaccgccccattacactgcaaccacccagcaggcggcacggcagtcggccaaggaacaggaataccgacaggaatgttagaggtatctgaaattttctgttctaatgctttatttaattgagcggtaagcttggttatatcaccattatctaaaacatcctcgccagattgttccgcaataaaattagctatgacggctgatatagttgatgattgatccaacgccttatttaacaaatgagagtgaacatcatttgaaggaaactctgtctgcaaatccgaacttattttatatttctcttgactcactatgtttttattattaataacagagagagctttaaaatcattcttgggactcatatgtcctccttgaattaaataacattatttcgcaactcacatcaatcaaagtctttacctcggctgttccggccattcaatatcgggagacaatgaaatatttactctattgagcattaccctatattttctccatgtcagtaaggcggatttttctacttcggtagcgatatttaaatcaacagcatcttgcagtaatgcaatggattcactcgcgtgtcgcaacagagttacacgctgctgttccgcttgttcaatttgatttgcttttagagctacattatcagtgacccattttgtgccatcccatttatcaaaaccggtggtcggttgcttgaaggtcagagtttcaggtaattcacccagttcagtgattttctgttgagttaatgttaacgtgtcgtaagctattttcccccgataatcagggacgatctcccaacacttaccgtcttcactgcgacaaacagccacatcatcagaatcgggaaagtctggtgcatctaaataagaatgtgctgataaactgacaccgagcatgacatattcaataccagcgttaataaattctcttgttatttgattcgtgtgataaacttttatccaaccgggttgaattgctaatccgtcttcacccaatacagcggtttcatgttctaacgcgtatttttgttctgtcattatgctgcatgctgctgctctcactatgtagttaaatgctatattacggggcctcgatacccctataaatgcggaattcgcaatccagtctgcctgagctttataatatacagcttttaccgaagtatttttattttgtggaatatcccactgcaattttgcaaactcattgcgtgagagggtaatcataaaattattagcccgatcaacattctgtaccaaataagccccttcctgccatgacaatattgaacgagatggatccacatttcgcccactatcccagccacggataaattctccccttagatcgggcaatctgccgtcaggataagcttctgctaactttgggtactgcaatttattgaaaaatgcaccgttacaaacgagatagttgacaggtggatagggtaacggccacggaatgggggaacccacaggtatattaatttcttcacgtaatgaatttattatttcctgagcaagtttttgtgtaaccgccaatgtattgctattgccaaccacatttgtaagttgaacaatacctttctgtgttaatgaagcatcaggaacctttattgtcattttctgttccagcgctctatttaattggctggtgagtttctctatattcccatcatccagaacatcattgccagattgtgtagcgataaaattagcgactacagaggatatcgtggaagactgacgtaatgccttatttagcatatcagtggtaataccatcttgtggaaacccagtctgcaaattctgattttcttcatatttttcttggctaattacattagcattatcgctaatagaaaaagctttaaaatcatttttttgactcatatccttactccttaagcaaaataatattttttataatcaacatatttaattactgtaaaaataatccgtctgtaattcattaaaatcaaagtctagttcagaaagaagagtaatacagcattcctatttattaggagattgactatttttatataattagcagtaataagtaattaaatattttagaatcgaaaacatacccaaaccatttatatttaacatctgaaaactattctgctcttattccttctatctcttcctgtaacgcctgctattttaaattccaagatgaatcttctggcatttggacacgaatatctaagcgacggtgttctggaatgtcataggctctctatcttcataaaacacacattcattgttctcaacgatacacttgagccgacagttctgaaaatagattggtaagtgaaaatgttggttttttaagctgcctgtacggcagtgcacaataaaaacgcacaccctcataactaaaaggttttctaagctgcctgtacggcagtgcacctgtcatgattatctcgctatgttagttgtattttctaagctgcctgtacggcagtgcactgttacatattaaccccaacctattgaatgttaaagagcaaccattataaaaaataaaaaacccttttttgtgggataaacaatatttactgaaaaatcaacagattaaaatttaccgttaaaaaagggtcaaaattttttccatccaagtagaaagccgtctctctttctatttccggctatcaagcgtatttttgttcagccattacgccgctcttactatgtaattaaaggcgatgttgcgaggacggttctccgaagctacaggaacaacccttgacgtgtcgaacccaaaaccgtatgtagtgtatacagcatcccgggtaaaatgatctactgatttaggattaccatctgtagccacgccaaaagttgcgttaccgtaaaaaaccccttttgctgccagctcaaaatgaagtgctattgccccaggaaatgaacctacaatatttctaatggcatccccttgatgagttaaaattccacggccgctatcaataccacgaccatcatcccatccgcgaataaattcgcctcttaaatcaggtaatctaccgtcaggataagcttccgccaacttcggatactgtaatttattaaaagctgaaccattacaagtgaaataaccgaatggtggatgaggtaacggccacggaataggagaaccgacaggaatttcattggctgttttcatccggttgtctatctcttcgcgggtatattcacgtaatgaatttattacttcctgaacaagcttttgtgtaaccgccaatgtatcgctattaccaaccacatttgtaagctggacaacacctttttgtgttaatgaagcactgggaatatctgttgtcattttttgctctagcgctttatttaattgagcggtgagtttggctatgtttccatcatccagaacatcattgccagatcgtgtcgcgataaaatcagtcacggcagatgataccgctgacgcttgacgtaataccttatttaataagtgggtgggaacattatctggtgaaaatccagtttgtaaactctgatttacctcgtatttgtcttgactgattacattcgcattatcactagtagaaaaagccttaaaatcattcttataactcatatactttctcctgcaattaaataatattattttacaaccaatatattgaattattgtaaaaacaatctctcttgcaattcacgccaatcaagtctagttcagaaaaagaataatgcagcgttcttattacttataaggttaattatttttatataattggtagtaataaatagttcaacattagaaacgacagccggaaatttatctattaatacccattacgtatcactattgacattttaattaaattacccagatatacgtctcactgccaacccagtaatttccctgttttttctcttttttctgcaagatggtttgactggatttactatgtttacgcttgacggtgactttttcttgagattcacctgtatttcgtcaacaaaaattcacatagccaggtttgccaaattgatctatatccaatggatttcaagatggatcgcgacggcaagggagtgaattcccgggagcagagataacgatgtgaccggggtgagcgagtgctgccaacaaagaggcaacttgaaagataacgggtatatttggctaaattcgatatttttaatataatccatatctgaaaaatgatacggctaatcagtgcagggttttgatagaaaaatgaacaaggtattatcacataaagaagagctaagccatttaacagcatgtttactcagcgaagttatctgttcacggacatcgttttcatggttcaaagcaatccatcgagcccttaaatgcccagaccgcaggttctatttctggtggagaattgctaattacttatataggacaaataaagccaagaaaatctcgattcgtatcaatagaaatttaagaaataaatatggatgtgatttaggattaggctgctatataagaaaaaatttacgtatatctcattatgttggcattgttatttcccgcacttgcattattggtgataattttcatgttttacaaaatacaaccattggcgttcttaatgaagatattcaagggaaaataagtataggtaatgatgtaaaaataggtgcaaattcttgtattataagtgacaacataacaattggagataatgtctacataggcgccatgtcatttatcaataaagatatccctgctgattgtattgcatatacgcctaaatctcaaaatgagataaagataaaaaagcaaaaaataattaattgaacattccaatttaaaataaaaaatggtaacacaatatgtttttaaaatataaatatcttttaaaactaggtatgctctgtaagcagaatataacaaaatcaatatacagaaatgtatccagtaaaaaaatgaaacacaatatgaacttttggcctcacataaagatctcaagaaacattaatggcaaaatcgacgccgtttcattcaataagaaaagtataaacatcaatgaattcccaaaaaaatcagaaaaacccttaatcattattgcatctggaccgtcggtatctaccatcaaaacagatttttttgatgataccaaatttgatattatgggtgttaacggctcgtatgaattatcaccagaggtaaaattcaaatatcatgttataattgaccgaacattcattctaaataggaagaatatcgttttaaatatattaaaagataatgaattgatactcttcacaacaatggattgtctcaatgatatcttaattcattacggttatcttgaattaaaatgtaaagtcattattattgagaacattgaccagccagtttatcaacaggaaaaagaactttttgaaataaagagtgatgaaataataatacagaacagtgtcgccttctcattgaacttaaatctcggattctacaacggaacaacagtggcatattctgctttgcaaatagcattttttttggggtataaagaaatatatttcgcaggtctagacatgaacaatttttcaaaaccaaggttttatgaaacccaaaatgacaagctagataccaaattaaataataacttacatgatttcatcattccttgtttcaacctggctcatgaaatagccataagaaaaggagttaaaatttataatctatcgaaaaatagcgctataaattcatttgaaaagttagattatagaaaaatttaagtcattagatttcttataagcagagcaacgagataattaataaatttttcatattcctagattgatttattttttatctcaaaaattttaaccattataattttacaaaaagttaaaatgatcacagatacatttcatttggtcttatttcaattaagggatttttattaattcccaaaatgttaaatctattgttcgatatactctatggatttcaagatggatcgcggcggcaagggagcgaatccccgggagcatagataactatgtgaccggggtgagtgagtgcagccaacaaagaagcaacttgaaagatgacgggtatacaatatgccgagactattgatacccattcatcactaatgaacatcgaaaaaaataagtattaccggctatagttggacattcataaaaaacacccttactaaataatttttctgtgaaataatattcataaatacatttatgtttatttaaaatttcattgttaaataataaataatttaattaatagttattttaccttgaaaagcaaattgttattctatgctatagaatcaaatcatgttacgtagaattattacttaaatcattcagataatgtcttaagtaatcaccaaggatttactatgcaaaatataaaaagtaaactaatcagtatcactttaatcttaacgtgtacgaagaataaaaatggagtcatttaaacatataaattatatttgataatcttaaaatatgaacaagaattccgttactaagataaaacatactttgaaacgatgcagagccactttgctagaaactcactcatttggagaccacgacaagaaaaataactaccctcttttacaccctataaacattgatcacttagggtcgccgaatattatataccctatggatttcaagatgcatcgcgacggcaagggaacgaatccccgggagcataggtaactatgtgaccggggtgagcgaatgcagccaacaaagaggtaacttgagagataacgggtataaatttatcatcactataataggcattaatcatgaaaaaaattaatggaacatacatttcatcacaaataataaacacaatggaagcaagcaatgaaccgtggggaatcaaagataaaaattcacgctttatttatggtaacccggccctaaaatctattcaaaacattccaacatcatttgattatgaagggctttttgatgacgaacttccttggggtggagcggcgtttgcaaaagaatttattgatcatgataaaattgtaatgacaaaagggaaaagaatctgttcacttgaaacatatacatatggaaaagaaaacattttatcgtcttacttccaagaaaaattaccactatataacgatgcaaaggaatgtataggcatactttttcatggatggaaagccaaagatttttcattaataaacttatatcaatattataacgttctccccacatctattatatttcaaccaccaacagatacttttacccaacgtgagtgggatattattttcttctttttacaaaaatataccaggaaacagattggaaaaatattaaatatctcttaccgtacaattgaatcccatatggccaatatatatcataagataggtgttgattccaaccaacaactggaagaatattgtctcatcaacaattttaaacgttatgtacccgaaaaatttttactattttaataattttatttactattttttagtcataaaaaacatgattaaatagtttatcgctgtcggtatgatacaggtaatatatgaaaattataccgacacaattttcatatattagaaacatcagttatataaacagtttactgcctatctcaatagggctattttatttgccattttgaacctgggcagtgctcaaaatcctcacgtactacgtgtacgctccggtttttccgcgctgtccgtgttcaaactgcctgcaacaattacgcctattttatttttagaaaaataattatttcctgttacagttactcatatttaaagttcacatcttaaataaaaataaatttaatcagcagaaagaattggcttttttccatcataaaacacagctattttaaatatcacaaacaaataaatcatttaaataatatcattattgaactaatttatctgtgtaaaattgatcgattctcaactgataaattactctcatccattatagaaaacacggttaattatattaagaaaatttacctcaaattaaatctataatggcatgcacaactaaacaattctcgtaataaaaatagccacaataattattttctgaaaaagtctattattactgataataaagtattaaactgataatatgattcaaacatatcacaacttaaacccaaaatgggtaaaaaggaattataatatgagtaatcgcatagctatatcatctcaagttattaatacattggcagtaagcaacgagccttggggaattaaagataaaaactcatgctttatttacggtaatctagcattaaaatctcttcagaacttttcaaattcatttgaatttgaaggggcctatgaaaatgaacttccttgggatagcgctaaatttgcggaacaatttattaatcatgataaaaaggtaatggaaaaacagcagagaatatgttcaatcgaaacccatatatttggcagagagcaaatcctatcgtcttactttttcgaaaaatcacctttttaccataaagatggagattgcatcggagtcatatatcatggttggaaagcaaaaaactattcattagcctatttacatcaataccacgacaaactaccggcctcaattatgctgcaaccaccaacggatctttttactcaccgtgaatgggatatcattttcctctttttacagaaaaataccagaaagcagattgggcggatactgaatctagcttatcgcactattgaatattatatgactcggatataccgtaagataggaattaattccagccaacaactggaagcgtattgtcgagccaataattttaattactatataccggaaaagtttttattgtcttaaattacgtatttattcctagtttttacatattacccttatccattattaatggagaaaataatccgccctgtttaaatatttcatttaaaaacatcatattagggatataccctatggatttcaagatgcatcgcgacggcaagggagtaaatccccgggagcataggtaactatgtgactggggtgagcgagcgcagccaacaaagaggcaacttgaaggataacgggtatataatcacggaaatccttctcttctggcattggcagcgattcaatatcactaccctctttatccgggattggtaatacggttatttacgacggaataaacgactgctcttcatttccggtatgcggtggagccttgcattcctgttcattcggcgtccataaaatcgtcggtcgattttctcccggctcccagaattcataattaccggtagtcggattcaatctcatcatacgaaccagcacgttatccaaaccactttccgggctgacatgatagccctgaaccgtcatctttccgtttttttcatctctgatccaacgaaagcgaatacgagtcagcgccttaccggaccgttccgcaattttactcaggtgataccgatttaattcgtcctcttcgccttgataatgaaaatcaggtcaattttttgcctccgacgttacctcgccggcactgtcaaagcagaaaatcattgatacaaactgtgggaaatagagtaagaacgtgatggtggcaaacatctaagtggaacttgaaatacaactttatatcttgggctataccattttaagtaagttttttacttaattattcttcgataatttaatttcatagaatttacctaaccttaattttatttaagaatagctattgtcagcagtaggaaaattcaaactcggtttttagattgaaaactctatttagttgattattctgataattccaaaatatagtttatctaattacaatgctctaaatacgccgtttaaaaagcattctttaattgatcgaatattattccgattaaatgtcattttttcgccattatcccgcgccaaaaataacgccttctttttcattctattacctatcatcgttataacaaccgctccttcacgcttcgattaatgacagaaagttttgatctacgtcacttaattattcatgacttaaaaaatttattcattaattttgctgtttaataagttaactaaaatatttttatactaaatagtatttttagttatattcattaatgttaaaagtatcactatataacaataaaaggtttaattaataaatatatgtattttgacgagcaagttattatattctattatattaccaaggcattttaagtataattagttagcaaacatgtcagataacaactgaaataatcattcaggagtcactaatgcaacatataaaaaatagacctaataatatcaccccacaattaattcatatgtgggaaaacagtgatgaaccttggggagctaaagatctccaatcgagatttatttacgccaattccgctttttatcaactacacaatttacctgacgatttcgagattaccgggcttaccacaggtgaattaccctcacctattgcagaatatgaaaaagaattccatcgtcaggatcaaaaagttcttcaaactatgcaacgtgttagttcactagaaacgcatccatttgaagaacataagattaagcaaatctatctttgtaataaatacccactttgcgatgaagatggcaattgtattgggctcacttttcatatgtgcaaaaccaaaaacttttctactgcctactattatgataaaacccctccggcaacgttggaatttatcgcccctaatgacaaattgacacaaactgaatgggaagttctctttctaacgctacgttcattagatgaagagaaaatcggtgaagcgttaatgataagtgccgaagatgtggttaatcatattcagtcaatctaccaaaaattcaatttatcattacacgaagaattaaaagatttctgtaaagaaaataaacttgacgcttatattcctgcaagatttgtcactatcggcagtgtggaattaaattgattacaaaattaaatatcaataagctaattttaaggctagaaaaaggaatgatactatgagtaacaagataatttcatcgcaaatcattaacacaatgaagcaatgtaatgatccttggggaataaaagacaagaactcatgctttatttatgctaatcaatcatttaaaaccctccaaaatctttcaaattcttttgactatgaaggagtttttgatgatgaaattccctgggatggagctgaatttgcaaaagaatttattactcatgataaaactgtaatgacaaaagaacaaagagtgtgttcacttgaaacgcatgtatatgggaaaaatcaaattctgtcatcctatttttttgaaaagctacctatttatcatgaagatggtagctgcatggggattctatttcatggttggcaagctcaggatttctcattcacccggctattttatggaaaactgccggcatctattatgttccaaccaccgaccgatctctttactcaacgggaatgggatgttattttcctgatgttacacaaatataccagtaagcaaatcggtaggatgttaaatatttcctatcgtacggttgaaacccatatctcacgcatatataaacgaattggtcttcattctactcgtcaattagaagattattgccgtaccaatgattatgatctctatgtaccagaaaggtttgtgcatccagaaagcagaatgtttccctgatccttagattaaaaggagcttttactgatatgaagaagaactacgcactatcacctcagattattaatacaatggaaatggaaaatgagccgtggggaataacggatagttcttcaaactttatttacagcaatgcagctaaagaaaaaggggtaatagcatggacaataaactaattatttcatctcaagttattaatacaatggagcagagtaatgccccgtgggcaataaaggataaaaactcacgcttcatgtatgccaatcaagcatgtaaacatcttcaaaacatttcaagctcttttgactatgaaggactttacgatgatgaaattccttggggtggggccgaatttgccaaagaatatatcattcatgatcaaaaagtgatggaaaaagaagaaagaatatgtttgcttttaacacataaatttggaaaagaacaaattctttcgtcttatttttttgaaaaataccctctttatcacgaagacggaagctgtatgggaacgatgtttcatggttggcaagttcaggatttctcattcacccggttatttcatggaaaattgccagccaatattatgttccaaccaccgaccgatctctttactcaacgggaatgggatgttattttcctgatgttacaaaaatataccaataagcaaatcggtataatgttaaatatttcctaccgtacagttgaaaaccatatctcacgcatatgtaaacgaattggtcttcattccagtcggcaattggaagaatattgtcgcaccaatgattatgatctctacgtgccaaaaagatttgtgcaacctagaagcaaaatgtttccttgaccattagattaaaaaggagtaataacatgagcaataaactaattatttcatctcaagttattaatacaatggagcagagtaatgatccttggggaataaaagatgagaattcatgccttatttatgttaatttggcattaaaatctcttcataatgttccaaattcttttaactatgaagggcttttcgatgatgaaattccttggaatggtgctgaatttgctaaagaacatgtgactcaagataaaatagtgatggaagaaaaagaaaggatatgttcactcgaaacacatctatttgggaaagaacaaattctgtcatcctatttttgtgaaaaataccctctttaccacgaagacggaagttgtatgggaacgatatttcatggttggcaagtccaggatttttcattcacccgactattttatggaaaacttcctgcctctatattatttcaaccaccgactgatctctttacccaacgggaatgggatgttattttcctcctattacacaaatataccagcaagcaaatcggtagaatgttaaatatttcctatcgtacggttgaaacccatatatcacgcatatataaacgaattggtcttcattctactcgtcaattagaagattattgtcgcaccaatgattatgatctctatgtaccagaaaggtttgtgcatccagaaagcaaaatgtttccttgaccattagattaaaaaggagtttttactgatatgaagaagaactatgcactatcacctcagattattaatacaatagagatgaacaataagccgtggggaataacggatagttcttcaaactttatttacagcaatgcagttaaagaaaaaggagtaatacatggacaataaactaattatttcatctcaagttattaatacattgaagcaaagtaatgacccgtggggaataaaggataaaaactcatgctttatctatggcaatttggcattaaaatctcttaagaatttttcaagttcatttgaatttgaaggactttatgagcatgagttaccttgggatggggccgaatttgccaaagaatacatcgctcatgatcaaaaggtgatggaaaaagaagaaagagtatgtttgtttttaacacatacttttggaaaagaaaaaattctttcatcttatttttttgaaaaatatcctctttatcatgaaaacggaagttgtatgggaacgatatatcatggttggcaagctcaggatttctcattcaccagactatttcgtggaaaattgccagccaatattatgttccagccaccgaccgatctctttactcaacgggaatgggatgttattttcctgatgttacaaaaatataccaataagcaaatcggtataatgttaaatatttcctaccgtacggttgaaaatcatatctcacgtatatgtaaacgaattggtcttcattccagtcggcaattggaagaatattgtcgcaccaatgattatgatctctacgtgccaaaaagatttgtgcaatctggaagcagaatgctcccttaacccttagattaaaaaggagttgttactaatatgaataagaactatgttatctctcctcagattattaatacaatggagatgaacaatgagccgtggagaataacggatagttcttcaaactttatttacagcaatgcagctaaagaaaaaggagtaatacatggacaataaattaattatttcatctcaagttattaatacattagagcaaagtaatgatccttggggaataaaggataaaaattcatgctttatttatggtaatttggcattaaaatctattaagaatatttcaagttcatttgaatttgaagggttttatgatgatgaaataccttgggatggagccgaatttgccaaggaatacatcgctcatgatcaaaaagtgatggagaaagaagaaagagtgtgttcactagagacacatgtatttgggaaagaacaaattctgtcatcctacttttgtgcaaaatatcctttttaccatgaagacggaagttgtatgggaacgatatatcatgcttggcaagctcaggatttttcattcactcggttatttcgtggaaaacttccagcttctatattatttcaaccaccgactgatctctttactcaacgagaatgggatgttattttcctgatgttacaaaaatataccaataagcaaatcggtataatgttaaatatttcctaccgtacggttgaaaatcatatctcacgcatatgtaaacgaattggtcttcattccagtcggcaattggaagaatattgtcgcaccaatgattatgatctctatgtgccaaaaagatttgtgcaatctggaagcagaatgctcccttaacccttagattaaaaaggagttgttactaatatgaataagaactatgttatctctcctcagattattaatacaatggagatgaacaatgagccgtggggaataacggatagttcttcaaactttatctacagcaatgcagataaaaaaaatttattcataatgttaaacaattatttgattataaactaccctagggtttggggtagtcgtgagttaaatagattataagatcaaatatctaattttaaggctagaaagaggaatgataacatggaaaatgaattaattatttcatctcaagttattaatacaatggagcagagtaatgatccttggggaataaaagacaagaactcatgctttatttatggtaattcagcaacaaaacagttcattcatgattttaaaaaatcatttaattatgaagggctttatgatgatgatctcaactgggatggagctgaatttgcaaaagaatttattgctcatgataaaagtgtaatggaaagaggaggaagggtatgttctcttgaaacacatctgtttggcaaagataaatttctatcgtcttacttttgtgaaaaaacgcctatttaccatgataacggggattgcataggaactatatatcatatgtggaaagctcaggatttttcattcacccggctattttatggaaaacttcctgcttctatattatttcaaccaccaactgatctctttactcaacgggaatgggatgttattttcctcctattacacaaatataccagtaagcaaatcggtaggatgctaaatatttcctatcgtacggttgaaacccatatatcacgcatatataaacgaattggtcttcattctactcgtcaattagaagattattgtcgcaccaatgattatgatctctacgtgccaaaaagatttgtgcaacctagaagcaaaatgtttccttgaccattagattaaaaaggagtttttactgatatgaaaaagaactatgcactatcacctcagattattagtacaatggagatgaacaatgaaccgtgggaaataacggatagttcttcaaactttatctacagcaatgcagataaaaaaatttattcatcaatgttaaacaattatttgattataaactatcctagggtttgaggtagtcgtgagttaaatatcaaatatctaattttaaggctagaaagaggaatgataacatggaaaatgaattaattatttcgcctcaagttattaatactatgcaacaaagtaatgaaccttgggcaatcaaagacaaaaactcatgttgggtttttggtaatttggcatttagacaaatccaaaatctcccagatttatttgattatgaagggaaaaatgatagtgaactcccctggaacggggctgaatttgcaaaagaattcgttattcacgataaaaatgttatgaaacaagagaaaagaatatgttcacttgaaacacatacatatgggaaagataaatttctatcatcttatttttcggaaaaatatccaatctataatgatgaaaacgaatgtatcggtctctttctccatgcatggaaagcccaagatttctcacttactcgactattttatggaaaacttcctgcatctatattatttcaaccaccgactgatctctttactcaacgggaatgggatgttattttcctcctattacacaaatataccagcaagcaaatcggtagaatgttaaatatttcctatcgtacggttgaaacccatatatcacgcatatataaacgaattggtcttcattctactcgtcaattagaagattattgtcgcaccaatgattatgatctctatgtaccagaaaggtttgtgcatccagaaagcaaaatgtttccttaacccttaaattaaaaaggagttgttactaatatgaagaagaactatgtcatctctcctcagattattaatacaatggagcaaagtaatgccccctgggcaataaaagataaaaactcatgccacatttatgtcaatcaggcatgtaaacgtcttctcaatatttcacgttcctttgattttgaagggctttatgataatgaattaccctggaatggggccgaatttgccaaagaatacatcgctcatgatcaaaaggtgatggaaaaagaagaaggagtatgtttgcttgtaacacatacttttggaaaagaacaaattctgtcatcctatttttttgaaaaacatcctctttatcatgaagacggaagttgtatgggaactatttatcatggttggcaagctcaggatttttcattcacccgattatttcatggaaaattacccgccaatattatgttccagccaccgactgatttatttactcaacgggaatgggatgttattttcctcctattacacaaatataccagtaagcaaatcggtaggatgctaaatatttcctaccgtacggttgaaaaccatatctcacgcatatgtaaacgaattggtcttcattccagtcgtcaattggaagaatattgtcgcaccaatgattatgatctctatgtgccagaaaggtttgtgcatccagaaagcaaaatgtttccttaaccattagattaaaaggagttctcactaatatgaagaagaactatgtcatctcccctcagattattaatacaatggcgcaaagtaatgagccctggggaataaaagataaaaactcatgctttatttatgccaatcaagcatgtaaacgtgttcaaaatatttcaagctcttttgactatgaggggctttatgattatgatcttccctgggatggagccgaatttgctgaagaatacatgactcacgacagaatggtgatggaaaaagaagaaaggatgcgttcacttataacacatgtacatggaaaagaacaaattctttcatcttatttttttgaaaaacatcctttttatcatgaagacggaagctgtataggaacaatatatcatggttggcaagctcaggatttttcattcacccgactatttcgtggaaaattacccgccaatattatgttccagccaccgaccgatcgctttactcaacgggaatgggatgttatttttctgatattacacaaatataccagtaagcaaatcggtataatattaaatatttcctaccgtacggttgaaaaccatatctcacgcatatgtaaacgaattggtcttcattccagtcgtcaattggaagaatattgtcgcaccaatgattatgatctctatgtaccagaaaggtttgtgcatccagaaagcagaatatttccttaatccttagattaaaaaggagttgttactaatatgaataagaactatgtcatctctcctcagattattaatacaatggaacagagtaatgagccctggggaataaaagataaaaactcatgctttatttatgtcaatcaggcatgtaaacatcttcaaaatatttcaagttcttttgactatgaaggtctttatgaatatgaattaccctgggatggagccgaatttgccaaagaatatatgcttcatgatcaaaaagtcatggaacaggaaaagagaatatgttcactcgaaacacatttattcggaaaagaacaaattctatcatcctattttcttgcaaaatatcctctctatcatgaaaacggaagctgtatgggcgtgatatatcatggttggcaagctcaggatttttcattcacccgactatttcgtggaaaattacccgccaatattatgttccagccacctaccgatcgctttactcaacgggaatgggatgttattttcctgatattacacaaatataccaataagcaaatcggtataatgttaaatatttcctaccgtacggttgaaaaccatatctcacgcatatgtaaacgaattggtcttcattccagtcgccaattggaagaatattgtcgcaccaatgactatgatctctatgtgccaaaaagatttgtacatccagaaagcaaaatgtttctttaacccttagattaaaaaggaatctcactaatatgaagaagaaccatgccatctcacctcaggttattaatacaatggcgcagagtaatgaaccctggggaatcaaggatgaaaactcatgctttatttatgctaatcaagcatgtaatcgcgttcaaaatatttcacgctcctttgactatgagggtctttatgattatgatcttccttgggacggagctgaattttctgaagagtatatggccaatgataaaatagtaatggaaaaagaagaacgaatatgctcacttgtaacacataaattttttaaagagcaaattctgtcctcttacttttttgaaaaatatcctctctatcatgaagacggaagctgtatgggaacaatatatcatggttggcaagttcaggatttctcattcacccgattattccgtggaaaattgcccgccaatattatgttccaaccaccgaccgatcgctttactcaacgagaatgggatgttattttcctgatgttacacaaatatagcaataagcaaatcggtataatgttaaatatttcctaccgtacggttgaaaaccatatctcacgcatatgtaaacgaattggggttcattccagtcggtcaattggaagaatattgtcgcaccaatgattatgatctctatgtgccaaaaagatttgtgcancctggaagcagaacgtttccttaacccttagattacaaaggagttctcactaatatgaagaagaactatgcattatcacctgaatttattaccacggtaaaaaagtgcaatgagccggggggaataaaggatagttcttcaaactttatctatggcaattcagctaaaaaagatttactcgtgactttaagcaatcatttaattataaagaattttatgataatgaaccaccctaggattttaggtagtcgtgagttaaattgattataagattaaaaaatccaatttcaaggctaaagaaaaaggagtgataacatgagcaataaactaattatttcatctcaagttattaatacaatggagcaaagtaatgaaccctggggaataaaagataaaaacacatgctatatttatgtcaatcaagcatgtaaacgccttcaaaatatttcaagctattttgactatgaagggctttatgagcatgaattaccttgggatggtgccgaatttgccaaagaatatatggcccatgacagaaaggtggtagaacaggagaaaagaatatgttcacttgagacacatatacatggaaaagaacaaattctatcatcttacttttttgcaaaatatcctctttatcatgaagacggaagctgtgtaggcattatatatcatggttggcaagctcaggatccctcatttacttggctatttcatggaaaactgccggcatctattatgttccagccaccgactgatctctttactcaacgggaatgggatgttattttccttatgctacaaaagcatagcagtaaacaaaccggtaaggtgttaaatatttcttatcgtacggttgaaactcatatttcacgaatatatggaagaattggggttcattctagtgatcaattggaagagtattgtcgcactcatgattatcatctctatatgccaaagaaatttatccatccaaaaaacagagtttttctttaacctttagaataaaggagttttactaatatgaaaaataactattcactatcacctcaagttattaatacaatggaaataagtaatgaaccgtggggagtcaaggatagttcttcaaactttatctacggtaattcagccacaaaaaaatttatccataattttaaagcgtcatttgattatgaagggctttatgatcatgaattgccctgggatggtgctgaattcgccaaggagtttattctccacgataaaagtgtcatgactaaaggcgaaagagtctgttcacttgaaacccatgtttttgggcaagagcaaactttgtcatcctatttttgtgaaaaattgcctctttatcatgataatggtcattgtatgggaattatgtaccatatgtggaaggctaaagagtattcattgacctgcctacatcaatattatgataaattaccgccatccttgctattccagcccccctccgatctttttactcaacaggagtgggatattatctttctcttcttacagaaacagcccaaaaaacagattgggaaaatattgaatatcgcctatcatgaggttgaagaacatatgctaagaatatatcgcaaaatcgggattcactccagtcaacagttggaagagtattttcgagccaataattttgagcactatatcccagaaaggtttttattgtcttagattacgtattattccccagtttctacatgctacctttgttagttatttattgataaaatatacggccctatggaaatatgctttgctttcaatgatgtatttacattcaataagttaaaaaagcaataattatcttaaaggatatttatgaataaatcaggattaaaacaagtcccttttattacccgccagttaacacatgtatgggacagaagccctgatccttggtttgtaaaagataaggaatcccgctttatttatgcaaataccaagtttattaaaatcattcagttaccggaaaactttagtattatagggtataccgttgaagaattaccaatagctgttaatggttttgcccatcactttaaagaacatgatcgcaaggtgttagaatgtatgcagaaagtatgctctgtcggcacttatcctcaaggtaatggtcggccgcctaaatcctatttttgcgaaaaatatccattgatgagtgaggataatcactgtgtcggcattatctctcacgccagagaattagagcactttacggtttatcattatattaaagagcatataccaacgtcagctagcctcaggccacctaatgatttgttaaatgagaaagagtggatggttatttttctattttgctgcggtatgaataataatgaaacatccattgaaatgaatgtttcatgccatgcggtggaaaaatattttgaaagtatttatgaaaaattatcggtcagctcattgactgagttacgattactttgcaaagaaaaagggtatgatctctatgttccatcaaggtattttctatcaataggccattttatattataaataatcgattttactgttaattattaataattctattaattatttagataataattagggatacaattaatgacatcgccaacctttacgttaattcaggatttatagcctatggatttaaagatgcatcgcgacggcaagggaatgaatctactctcgccgaaataaggcgggaggggcgtttcgacgggactaacgtcccgtatagtgtttcacaacgtcgagcatcgtcacacgcgccggcaaaatgaaaacgagacccaagaacggacttgttgtctgcctctcatactgatggaaagcggtatatcgggagtggttgagggtgtagcaaggaagcagcctgtgcacagctttgactcagcagccttatcactgtctccgcaccacttcgattaggatttatccttatcatccgcctctctaacgtgggatcagattggcgaaatgtaccagataatcggtaaaacagtggcggaatgtcaaactttgattcagcgcccaccggatatggcagtgcaccaagctgatgagcaacatgaagtacctgttcggcaatctcatcataaaactccaccagcaatactttcgattgtgcattggcgataaacgcctgtttcacctgcggtatgatcccctgattaagccggaccactaatgtttcactcacctgagcctgcacagcatgcatcaccggagcaaataccaatccacgcaatacttccaatgcctgaaatccctgtacttgactgccaccggaatacatactacgccgaatgcgctctattgccgcttgttgacctaccacaacaccgataccttgcgggccaaacagtttaaagctggagaaggccgataacgccgcgccccattcacaaccgatacgttccactttcatggcagcatagttatcgtcaaccagaaccggtagtgatgccgcattcagcagtgatataacgtctgccagctcataagcatcatcaattttctgccgcgtgtgttgtaccaaccccgccaccggtaaatgttgcaaaatcgcagctcgtatttgttcggattgattgaaatcggcccgcaccagatgcaagcccatctgctcggcaataatcgccgtcgagggatataacggcgcatcatgaaccagcaagcgatcacccgcattaagtaatgccgatagcccacaacgtattgccccggttcccgccccttgtactaacacagcagcctcagcagaaaagaaatcggcaatgacctgttcaacacgttgcgttatctgtggccggttcaatcccggcaccagccctaaatctccggtggtgaggaaatcagcaccgggaaaatggcggcaaataatgtcaactaaatgaaactgtttgtgctgcgcctgctccatgctcagactaggtaatggatatgtgttcactatctgttctcctgttctccctcacttccccccctctatttttatcatcacaaaataaagggggagaacagataaataacgttagctagcaccccaactacaatcgttgcaatcggcccaatcgccatttcaaccaaaggacgtttagccgtacggttgagtagataaatccccgccaccaccataaatcccatgcccggcagaatggcgttggcagccatcattccccccaccaataaggcaacttctaacatgcgggtaataacagtacgaatatgctcaccacaagctttgacgccgggatatttatccaaccagatagcaattctcgccagcagtttgatttccataaacataatcaaactaccggcaatgaaggcaatccacagattattcgtgactaatccggcgacaaatacaaacttcatgccgaccgggctataaaccccggtagcaatggctgtcataccgactaacggcacaaagctgatcgctctggcaagcgccaccagcatggcattagccccttccccctgcgccatcagttgcaaggataccggaccttccgccagcagactgagtgacattgaagccgctaccgccgtcaaaccaccacttaataccagcaaccaaatgttattttgaatgcgctgtatccgcgtggagaataacccaaccagcgtctcattcgcccctttggccggagcagatccctcgccagctttgggaacacgctgtttcatcgcgaagtagaacatcacaatcattgagatcagcagggctatcccgttaggatccaattgcaccggtttgctcagagccccaccaaaacttaatgatcctaccgctttggtcgcgatataccccaccaatgtcgcaatcagtacccatattcctttgccatatccgtattgataggccacaacaatcgcaggaaatagtgcaaagcaggctacgataggatcgccaactttactcaggttgcccatgaaattaaccggtaaatgggcaaagatatcgacaaccgatcgtaaaccggtcatcaaggcaacggcatacagcgctcccaagacagcagaaagtatgaaaccttttttactgtttgcacaccaagtaccaatgacatcggttcccaataataagctatgcaccagaataatcggggcggtcagcgagaacggaataccaaagccgataactaacccaaaacttagggcaaaactggtggcagccagggttttacgattcatacgcccttccagatgttccggcattaaaggacgtagcccatcatgaaatactgcaataccgcggttagccatcatggcagatatcccaccaatcaccgccaataaacccgctttaaatggatcaatttccattaaacgggtgaaaaattcatattccattttcctctccttatgaaaaaagaatagccttgataattaccagaataaccgcgtctatatcctgaccggtaaaaccaaatgcggttttcccggcgtttacatgggcaataatttcttcatcaggcaggatcttgcctggcatactgacggtggcgcatttgtcaataccaacaatagcaattgccattgccaaagcgcctccaccggtattacaggcaccaaaatagtaatccgcatcaccactcttaagcgccatagcggcatctatgtcacccatcacggtaatggatgaggctttatcgccagccagatggcgtaaagtttcagcaattttttctttctcaatttgtcctccaataacaaatctcataggtttttcctttagttgaaaaatagcattgggttatcacgtaacatcaaatcaatatcggtttgcgttaatccagcccggtttagcatcggcacaaaggtggtgattaaataatcaaatccattgccgccattggcttttaaatgagaacgacgggtaatatccatcgataacatgacgcggttaagcaagccacgttgggccaaggtctgtaacatagcgatccgcttttcatccgggtagtaatcgtttttgccaatcgtgtcgaactggatataggcccccagttcaatgatgcgcaaaatgttgtccagattatctttaagatcacagtgaccaataactacacgttcagcatctacaccgtgctttttcagtaacgccagttgttcaaggcccatcgtgcttaatgtcgtatgcgtcgaaataggatgcccggttgccagatgagctatagccgcagcatgaaagactttctcttcatccggcgtaattacccctttactggaaccaatttccccgatcactccggctttcagcgttgtatcgtcgataccctgctcaatctcagcgatcatttcatccgccagttgtcgagctgtggtatgtgctacatgttcaggaaaaaaggcagattggtaatagccagttgaaactattacattaatgccggagtcccgcatcagatccagcataaactgtgggttacgtcccatgtaacgattggtcatctccacaatattgtgtacacccaagctgaccagtgttttcatctcttcacaaatcagctcgtattgatccagtcggcagtcaatgttgtttttaaatgatgataaatcgagatgcaggtgctcatgtacataggtatagccggacgcgtcaattctgtttttctgggtcatgagtaaggcggtccgcagacgaagagagtggaactgtgtctgttcacagaccatgttctccattaatcgggatagggtttccctggctgtcataaagcccttccaagaccggatgccctgactggataccgctaactaacgccacatcactgcgggtagcaaatatctgggtgcgaaaacacagcacgacagcacagccgaccggaaattcaccgctcagaggaaagtggtaatcaatactggtgttatccatcggtaacaggtgcgtggcggcgatctggccgtttggcaggaatatcagcgcgttatgcgcccgtccacgacggtaataaccgcccccatagcagtaactgttaccgttaaatcggtgggatatttccgtcaaatagagcatagcaatgcgttctggctgctctccccgaaaattggcaaggatggttcctgttagcgcatgcccgggctcggtatgggtcacgccatactttgccagtaacggcagtgtgctacagcttgacgccgatggcgcatttatctgcgtcacctcaaccccagtttgtcgtaaaatgtcttttgctttcagtaaagtaaataagtttggtgccggcagtgtctgctgctgatcctcttgccacagcaagcaaggaaaatgtgtcaaccccgtcagttttacaccgggcattgccataatgtgctgaacgatggtgtgcaattccgacaagtgaaaacccgcttcctgacccggatataaatggtcatgatcatcgtagattttcagcataatgcgttgcacatttccctcacgccgcgccagactggaaatttcctccgctttttctaaagaatatactgtgatcacttccggatgttgctgcatcactgaggagaccatattacgagggatctgtaccagatggcctgcatgagtcactgggatcttcccactcatcaaggctctagcctctttaaaatccaccgcggtgacaccctgataacccaattccatcagtttacgtgccaaccaggagttacgcccaacctgtttggtcatcagatagagagcaatgccataatgctccgctaccgcaagcaatcgtctggcattttctaaaacctgatccacgtcaatcacataagtatcaggcagtaagaccccttgcgcccataatgtctgggctgcctcaatcagtgccggattttgtttgttcagtgcatgtataaacatgcagtacctcctgtactccttcggcgatcaatgccactgcattaagttagatgttaaatcatcatttttttgaatatttgatggaaaaaaattccctcatctctatggtggtattatcactgcccctttgccgcccaaaggctaaacaagtttgccagcagataaccctcttcacagggatgtaattgcacgtcaaaatgtgccagcagcgaagcgttaattgcttgcaaatgagaaaagattctcgattgacgcacttccatcagcagttcattatccattgaactgatttgttctccccggcgtgagcgcattaacgcgttggccatatgtgttattactatttcccctaacgcattcctgacaggaatttcccaatcgttttcaagctgcgccacaacttgtaacatgccatcatgaatatcctgatcaatgacatttccctgatagagcagattcagccgattttccacgcgttaacgccatccatgccaaattaataacttgggtcctgttgacctgccagtacacgttgttgatgaactaataactctgttgtatttaccatcgtgcgtaaaagttgttgcatcagaatgtcatcagctctggttaaaatcaccgcttcagaggctcgggtaaaacatgcacttccactgagcggtactgcaataagctctctggaactgagttcaacttctctgctgacgttccagatcacggcatcaatgtcacctttcgcgaccttatacaggctctcgtggtaagaaatatccaccaacgtgatatcctgcccggcaaagtacacttcagtcatgattttctggtcggcagaacgatgatccaacccaacacgacggatattatgttcacctcctttgcgataaatcagttggtgtgcaccaacataggtatgtggccccaattcaagtacagtacaaacatcaccttgttccagataagtttgcgccgccaaatgtgataccaccgccaagtcataaatacccttacgcaagcattccaccctggcatctgaacctctcatgtgggcgaagtaaaatggaatgccctcaaattgcgctttcagcccgctcgccagcccttcgtacaatcgggtataaggcagcggcattgcacaaactacgttgctaatatcagcatgggctaacagtgctttgtgatccatactgaccaaatagctaccattacgccctcgtcgttccacataaaccgcgccagaactctccagtttttttaatgcaaactgaactaacccaacagataacccatagtcagatgacagctcttcaatcgttttcaaccgattaccacagcgctcacctagcagataacgtgccagacacgcttgagcaaccccctcttttttaagcagcccatgactcataataattcttcatttttttgaatatatttatatccaatttaagcaggcaaatgacaatcgaaaaatagtaaaaatgcgaatgaggtcacgaataaataggtaattttctgaaatttcaatgattttagtttgataattaataatttctgtttttatggtttagttgtggtcgtttctggacgcttaatcagtgcatagatcaatcctgccaacaaagtaccgacaataatcgacatcaaataacccagtattggtgtgatagcacctggaatcaacagcacaaacaggccaccgtgcggtgccattaattgcgcacttattgccatagagatcgctcccgtcaccgcaccaccaacgatacaacatgggagcacacgtatcggatcacggacagcaaagggaatcgcgccttcggaaataaaacagagtcctaacaccaatgcggctttaccactttcccgctgaacgttatcaaacttctgccgggcaatcagtgttgccactcccatagccagcgggggaaccatccccgcagccataatggccgccattggcgcgtaggtttgtgagctaagcaagccgacaccaaacgcataggcagctttgtttatcgctccccccatatcagcacacatcatcccgcccaaaatggctcctagcaggagtgcgttggttgtccccatgtgagaaagccaatacgttagccccgccataataccggcgacgggtttaccaataacgtaaatcataatcaggccagtgatcaggctagtaaatagcggaatgatcaagatcggtttcaatgcggccatactttgcggcaatttcactttgctgttaagcaacttcgctacgtaaccggcgaggaaacccgcaataataccgccaataaatcccgcgttcgtgctagttgccagcatgccgccaattaaaccgggtgtcagacctgggcgatcagcgatcgagaaagcaatgtaacctgccagtacagggaccatcagcgcaaaagctgagctaccaccgatttgcattaacgccgccgccaatgtacccgattctttaaatgcagtgatgccaaaagcaaatgacaatgcaatgcacaggccacccgccaccaccatcggtaacatgtaagaaacacccgtcaacaagtgacgatagataccggtattatcttccctccggtcagttttaaccttttgcccttccggctcgaaaagcttggcttcggctagcgccttatcaaattcttgcgctgttttcttcaacgccagcccggtagaggtacggtacatcggttttccggcaaatttcgccagatctacgtcaatatcggcaacgactagcaccagatccgctttttctacctcttccggcgtaatcacattacccgcacctactgaaccacgcgtttccaccttgacccaccaaccgcgctttttggcttcggtttcgatggcctcagcggccataaaggtgtgcgctacccctgtaggacaagcagtcaccgcgacaatccgttttgtatcacaactgatgtcagttgccggtatctgatacggcttggcgtcagcttttgcctgctgaaagaaatttttcggcgcatgcaatgcctgttccgtgtcaccgagataaacaagcttaccgttcaatgtgttatcggtggggatgcgactgccggtcacgaccaccaaatcggcctctgctggattttctgttagtatctgcccgatttccgccgcagcggcactgaggattgttttcaccagataacttccggcaagtccgagtgaaggatcaacgataagcagcattttcatcatgcttctcctgctgttagctaaaagggttgtagatcgacgtgcgccattatcacggcaaatgggggatttctactctcgcggcccctcgcccaaaccggaggccaccgcttcaccaatggccgctatcgcctgcggcgcatcatcaccattggcagtaatgtgaagccgatggccttttttagcgcccaatgtcatgattttcatcagactacggccgtttaccggttgaccggcaccatcaagattgatgagggtaatttcactggaaaattgccggataacattgaccaacacagcacctgggcgagtatgtaagccatgttcgttgcacaggacaaattccccgctggatatggtgctctgcgccagtgcgccgctggtcagtaatgccagcactgtcggcgcatcagctttcagcaaacattccgctttttgtgctaatagcaagttacttaggtggtgcaacacacttagtggttggtcgtcagcaaccgccaccgtcagcaacatcaccaccggctcgttatcccgcgtgaataatcggctcactgctacagcgctggttaagttaccgtcggggctatcactgagccaaatgccctgcccaagatccagtggcttactgttaatcactttgctgacaaaggtcgtatccacggcccccgctcgctgtaaccgcccggcattcaatgcctgtaatgtcatcagatcgcaggcattaacatctaacgtaatcaagctggtatcgaatttgaactcagactgctgaacttctcccattagcaagctatgcagtgcctgtgctgactcaatagtttttagctgttttgcaatacgatcatcactcagtaagtgtgttaactggcgcagtagtgccaaatgctcatcggaacgcgcggcgataccaataaccacataacacatcgcgccttgatcccattcaacaccctgtgagaagtgaaatacctgtacatcggttttcatgaccagatcacgagtatctaacgtgccatggggaatggcgataccgttgccaaggtaggtggaaatttgcttttcacgttgcaacatgccgtcaacataggcatcaccgacgttaccattcgcggctaacatggccgccacctggcgaatagcatcctctttactggtcgcaattgcgcctgtatggatattttgcagagccaactggaacataattttctccctattaccaaaaatagaatcgtttcagtttacgcagagaaaaaagcattaagtccatagaaagaaaaagagataaaaaactgaaacgtttcaacgagtgtggaacatgactaattttcattcaatacttatgtgaaataaaatcgcaattttttgagattactcacatttttccagccatcgttttttgtctatctccggtttaagagatttggtaaaccttgagggttctgtgaaacattttttttatcgacagagggaacagatttaaccgcatttataaatgtagtggtcaactcattccgaaacacttatagaaaagttagttttacagcgatggtaagaactctcaatatgagaatattaaacgtcacgctatttaagatggtctaagatggtctttatgtatacccgttatctttcaagttgcctctttgttggctgcacgcgctcaccccggtcacatagttacctatgctcccggggattcacgcccttgccgtcgcgatgcatcttgaaatccgtagggtatatgcgccttaacaggcgcatacatcagaatcgcttattcagttggacaaggattttcatttgggacgtaatcaaagtgtaattctcggtgccgattcctttttacaccccaaacaccgtggaaacgctctgcattactggcagtatagcgtactgtatggcgaatattactgtgcccaagataatcttgtatcaaccgagtatctatccccctatctgcaagcgcaaaaccacaggcatggcgcaacatgtgcggatgagagcctacggaaatattagccaatcgtcctaattgactaataagttgataaatgcgctggcgagtcagtgggtttccgctgcgtgacagaaacaaccaatcactttctgcccctcggaaggttttacggacttttagccactccctgatcgcctggatttcatagcctaacagaggatgaatagtagaaaatccgccttttaaacgccggatatacaaactgccatcttccaaatccagatcagatatccgtagatacctggcttcactaacacgtaagccatgaacaaaactcatgtataccagacaatagtcgcgctccccattagggccctttttcgccacttccagcattctttccacttcgtattgcgttagatgtcttcgctgacccattatggtctatcccaaatattctttgttgcaacgcatttaacacgctgcgttatctgtaactgattaagacccggaaccaaccctaaatcccccatagtaattaaacctgcgccagaatagcggcagatgactgtatgaaacctctgtttctgtacttgatctatgctcaagctgtgtaatggatagatattcaatgtctgttctccggtaatttccccctattcttaccatcacaaggccaaaagaaaaatagtgattcaattaaccgatccctacccaataaggctttttggctaaaattaccaacaaaaatcgctgcgataggcccaataaccattttaacaaaaggacgtgtccgtcagattgatgtctggttcaaatcactaaggaaggatgttgatgcagcaatgttttccggcttccagcttccgataaacatttaatctctctatacccgttatccttcaagttgcctctttgttggctgcgctcactcaccccagtcacatagttctctatgctcccggggatccgttcccttgccgtcgcgatacatcttgaaatccatagggtatatatctttgctagaagaaaccggcggggcagcaaatctaacaaactggtaacacgggtagacgatcctctatacagaataatctggtatatcagctagatacaatattcagcttttcaaactactaccagattttatccatatcgtcatcaatgatgccttttataaattttttaaacctcaatattatgacccattattgcccttctccgccaatcatttacaacaaaaattagtttgcgagcataatcacacgtttaaaagttacatgttacttttcccgttatttgttatttaaaacaatcgggtaagtgtcattttatctccctatgctgttattcttaatctgtctctttagttttatgtcattaaataatatccatagcagggaacaaaaatttaatgaaaagaatcattaacacattgcaaaaccttggcaaatctttgtatggcccggtgttaattctccctattgtcgggctgtttattgcttttggcaatgtattgggaaacggtaaccttgcagaatatcttccatttttaaaccacgggttaattcagcaatctggcaaactgatcgcccaatctgctatttcaatattgagcaatctggcgttgatttttgctgttggaatccctatcggactggcaaaacgcaataaaggttatgccgcattgatcggtctggttactttcgtcatttttatcaacgccatgcacgtcactttagcattacaaggaaaattggtgccagaaacgcaaatgcgcaatgttggtcaaggaatggtgctaggtgtgcaagtattggaaatgggggcttttgccgggatattgatcggtgcactggctggctattgctataaccgttattcgtcaaaacagtttaatggtgtaatggcaatttattccgggcactgttttgttgccattctgatgatccctctggccgttatatcgggttacttaatgagtgatatttggccctatgcgcaacggagcatcagcgcccttgcgcatggtattcatgagtccggggcatttggcgtcgctatatacggctttctggagcgcattctgatccccttaggtttacatcatctggtttacacgccctttttgtataccgaattagggggcattgcagaggtatgcggcactgtacatcaaggagctcgtaatatctatttcgctgaaatggcctgcccggctgtacatcaactcagtcacagcgtggtatgggatgcacgagggatcagcaagatgtttggcctgactgccgctgcactggcaatgtatgtgactgcccgcccagaaaagaaaagtacagcaaaagctgttctcatccctgccgccatgaccacttttttgttaggcgtgaccgaaccactcgaattttctttcctgtttgttgctccgctactatttggtgttcatgccgtgctaaccggtttaggttttatgctgttctatctactcggcgtacatgctatcggcgctaatggcataatcgacttcatactgtacaacttaccgctcggtaccgaaaaatctaactggccaatgtatatcgccgtagggctaatcatgtcggtgatttatttcttcgcattccgtttcctcattttacattacgacctgaaaaccccgggacgcgaaaataacgatcaggaaacacgcctctatagcaagcaacagtatcaagttgccaatgatgacaaaccaggacaacaaatcatctgtgggttaggtggtacagcaaatattgtcgctatcgacaactgctacacccggctacgcataacagtacatgacaccacgctcattgacaaaaacaggcttaaatcaaccggcgcaaaaggtgtcatctgtcagggaaataacgttcaggtaatttacggtctgcacgtccaaaaaatgcgtgaagccgtagaagaagcactttaacaggagcataaacatggctaacgcccctttcattttaactatcgctggcggcgggagtacctatacgccaggtatcgtaaaaagcctgatggtacggctaaacgacttcccactagcggaaattcgtttgtatgacatcgatactcaccgacaaaacactatcgcgccggtagtagaaaaggtgatacgcgaacatagccagacgattcgctttgtcgtgacaagcgaggcaaaaaccgcctttagtggtacccattttgtctttgctcagatacgcgtcggtcagtataaaatgcgagaacaggacgaaaagatccccttacaccacggcgtaattggtcaggaaacctgtggccttggcggattggcttatggtctacgtactattatgccaatggtgaaactgatcgatttagtggagcgctacgcagacaacgcttggatcgtaaattactccaaccctgcctctatcgttgctgaaggaatacgccgtctacgtccacacgctagcgtactcaatatctgtgatatgccagtggccgctatgcgcaacatggcagcaattttagacgtagatcgccacgatatgactgtcgattactttggtctgaaccatttcggctggtttaccaaggtatgggtgaacggaaaagatcatttgcctgaattgcgtcgccatatcgctcagcatggtttactgactgctaatgccgcacagacagatccgcaacatgccgatccgtcatgggttaaaacctggcgtaatatcaagccgctcatggaccattttcctgattatgtgcctaacccctatttgcaatactatctgatgccaaaccatattgttgagcaccaaaatcctgactatacccgtgccaatgaagtgatggacgggcgcgaaaagaagttgtttaaagcagcggctgagtttaaacatacagggattttacccgacgctttccatgtaggggtacatggcgcttttattgttgatgtagcatgttcactggcttttgatttgcgccaacgccatttggtcattaccgaaaacagaggcgctatcgctaacttaccttatgatgcaatggtggaagtacctgcttacattaccgctcaaggccctgaaccggtatgtatagggaacgtaccactgttccatcaagcgctgctagcgcaacaactggcttcagaacagttgttagtggaagcggcattagaaggtagctatgagaaagtgctgcaagcattcacactgaatcgtaccgtccctaccatgcaacaagccaaagcgattctggatgaaatgatcgaagccaacctgggttattggcctacgctaaatccagcctggcaccaaggtgaagcgatttaacccatatttaacctataatctgcctttcttacatagtaaagcagatttttatgcgagccggctcactatccgacaatcactatcttgaggagattaagaaaattcaccacaattcaattaccgaacagccgaacatataccctatgggtttcaagatgcatcgcggcggcaagggagtgaatccccgggagcgggagcatagataacgatgtgactggggtgagcgagtgcagccaacaaagaggcaacttgaaagatgacggataatcgattagcacccttattacagcacagcgaaagaataactcgcgcggaataccgcgtattatcctatttaaccgcgcatccattgttaattgggcaaattacagtacgtgagctggcaaaagctacgttcatttctcccgccactattatgcgtttatgtcagaaactggggttcagtggctatagtgaatttatttggtactgtaaacaattactgtccagtggaacgtctatttccgggaatattcagccccatcatactgagataattcctgatgcatttgaacacttcgtgactaattaccgtaaaactttctctttaattacaccagaaaaaatgtcacgctttagcactctgctacgtgagaaagagaatttttttctctatagtgccggtttctccagactatttgccgattacttgacgcaaaaattgcaaatattagggaaaactgcttttaaatccggcccaggagatagccgtaagattttcctaagtaatgcggtgaaatatgaagtttttattgctatctctcgcagcggccagacagaacaagtattggataaagtacgcattgctcataatgttggtatgacagtcattgcatttacccgctcatctgctaatccattagcttcactggctgatgtgcactttgcactgtatgacgaggcaatttatttcgatgcagaaatcaacgaaataacttcattcgagtctaatctgatcatgctcattgatttactattattacaagcaacgtcttaattcattgagtacaagccatacaacatgatctcgacagacaaagaaaaggaaaataaaaacagaaaaagagatgttaaggattaaatcaaacctgtataaagacgatttaaataatttcagaactaaacaatattaatgcttatgtttttttacatagaggtatttttttacatagaataataagccatttaattaacagatatgtgtaaaaatcgataaattttatttctctacgaattaattattgcaatctcttatataatcaggttattttaagtgtaatcattaaaaaaacgtttcagataatgatttaaagactcattaaggagttgccatgttaaatataaaaaacaaacaaaataatatcactccgcaattagtttacatgtgggaaaatagtcatgatctttgggaaactaaacattgccggtcaacatttatctatgcaaatccgtttttttgccaacgactcaacttatctgaaaattctgatattatcgaattttcagcaagtgagttacccttgcctattgcaaaatatgaagattcaggaagttgtattaatactctctttgataccaataaagcaaaagatttttctctaacctgtctgtgttttacaaaaatacatcggccaaaaacaaaaagaatataccctattgatttcaagatgcatcacggcggcaaaggagtgaatccccgggagcatagcaaactatgtgaccggggtgaacgagtgcagccaacaaagaggcaacttgaaagatgacgggtatattgttgccttaacgatgttgatcgcgcgcgacacaccagaaaaatttttgccacaagaaagtattatattttcctaaatcaaaatattacacaaatatgactagaaaaaactcaactacctcgttacaaataatcaacacattggcagcaagcaatgaaccgtggggagtaaaagataaatcttcctgtttcctctatggtaatgatgcattaattaaactccaaaatataaatgccaactatgattatgaaggtaaatatgatagtgatattccctagaggggcaatgaatttgccaaagattttattacacatgatttgcaggtaataaaaaatagagaaagtattttatcattagagacacatgtatttggacaagataaagttttatcatcttatttccaagaaaaatttccactcgatgatgataaaggtgaatgcatcggtattcttttccatgcctggaaagttcaggataattcactgactcggctatttcacagtaaactacctccttctattatgtttcaatcgccgactcatctcttgactgaacaggaatgggaagttgtctttctttttctacaaaaatacaataggacacaaatctgtcaattactcaaaatttcagataaaaccatagaggaatatataagaaagatttataataaattgaaagttaactcagactcacaactggaggaatattgccgactaaatagttttgatctctatgcgccaaaaaggttcttattgtcttacttataaatatcgtctatttattcaaattttttataccctatggatttcgagatgcatcgcgacggcaagggaacgaatccccgggagcatagataactatgtgaccggggtgagagaatacagccaacaaagaggcaacttgaaagataacgggtatataaggtaataatgttataaaggtcaaatatgagtcaatcaggatgtaaaaaagccccttttattactcctcaattaactaatatgtgggataaaagctcagaaccatggtttgtaaaagataaggagttccgctttatttatgcgaataaaatgtttattaaagctaataagctacctgaaaatattgatattattgggtataccgataaagaattaccttcgccagttagtcaattctctcatctttttgaggagcatgatcataaggtgttacagggtatgcaacgaatatcatctcttagcacttaccctcaagcaaaaaatgaacaagccacatcctatttctgtgataaatatccgttaatggatgaaaataaacagtgtattggcataattgctcacgcaagagaaatacataactttactgtatctcattatatggagaacaatatccctatatcaattcgatttcaaaaacctaacaatatattaaaagagaaggaatggataatcatttttttattctgccgtggcgttagtaatagatatatcgctgacgaaatgaaaatttcatatcgtactgtggaaaagtatttcgaaagtatctatgagaaactatcagttagctcagcaattgagttaagaacactttgcaaagagaatagttatgatctttatattcccccccaataccttcaatctataggccatattttgctataaataatcgatttcattattacatatttctctctgacctgtttaattaacctgaattttacttaaattccccctaactgatatacggataacaatttgataaatcaaaataaagggctaaaaacgtgactaaataatcatttttttgaaaatttacttttctatttctgttgaagactttatataaaaaacgatgaaaccaagagattcccatgagcactgacaggtgctttatcatggtcgaatggtttacatcaacatcttgccaagaaacagggggcttataaccctgtttccattccaagatccagatacgccacaatcaacgaacaataatacctaacagaattcccaatgcgccaaagtcagcatcactgaatgtcgtgttagcaatcccgatatcccccaaaacgggtaacagaaatacgggtaagaaggtgatcagaaagccctgagcaaaagccccgagaatagcgcctctacgcccccctgtcgcattaccaaaaaccccggccgccgcaccaacaaaaaagtgcggcacaacgccgggaataatgaccgtcataccgagtgcatacagtacaaacataccgataacgcccgccacaaaactgctcaagaatcctaccaatactgcattaggtgcgtaaggaaagacaaccgggcaatctaatgcaggtttagcatttgggaccagtttgtcagaaattcctttaaacgcgggaacgatttctgcaatgaccattctcacaccttgcagaataatgtatacacctgcggcaaaggtaatagattgcattagcgagaacataaatccatttttcccaccactgacttctctcacaaaatcaccgccagcgaataagcaactgatcatgaaaataatcgccatcgtaaaagagatagcaaccggtgtatcacgcagaaacagcaaacttttcggaacattcatctcttcagttgagtgagccttattgcctagtttgctgccaataaagccagagagcacataggaaagcgaggaaaaatgcccaatcgcaacgtcgtcagaacctgtcactttcttcatatatggatgggcaatcgccgggaaaaaaaccatcgcaacgccaacaaccacagaaccaatagccactagcatcgaacccttgatcccggcggttgccagaatcaccgcgaccatcatggacataaataatgtgtggtgcccggtcagaaagataaatttccacggggtaaaacgtgcaatcaggatattaatcaccatagcaaagaacatgatcattgccatttctttaccaaaactcttttgcgcaatagaaacaattgcttcgttgtttggtacgactccctgaataccaaaagcgtgttggaaaatttcagcaaaaccccccagtgacgagacgactaacccagcccccgcccccaagatcaaaaaccccataatggtttttatggtacctttgatacattcagtcaccggtttcctttgcacgatcaaaccaacaagcgcgataaaccccaccaaaatcgcaggttctgacaggacatcactcatcagaaaatgaaaaaattccatgacaacctcccggttacagtgcaccaagttcaactaatgccacggacagacgtactttcattgccgatttatccaccatattgtccagcgcaacaattttgccatcgactgcctgaataaccagttgttctgcaatatctttagtaccgacaaaaatatcgctttgagttgcttttgctgatcccaaatcgatgtgatcaacactggcctctactcccatctctttcagaatatttttgatgctcatttccatcatcaaactggtacctaacccatgtccgcaaacgacggtaattttcatactgtttccccatagcaaaaaatagcgacttaatactggctaatcacggcaagaatctcttctttacttttggcactcatcagcaatgcgacatcctgttgattatcaaacaactcagcgagctgagcgatcacttcaatatgactattgctgtcagttgctgctaaaacaatcaacaatttgatcggatcattttcctcagaaccaaactccactcctttgctaatcacagttaatgctaaagctaatttattgaccccttgttccggtctggcatgtggcatagccattcccggcccaacaacataatagggaccaattacctcatgcgaatgataaatagcatcaatataacaagcagaaatagcaccattttccaccaaaggctgacaagcaatcgcgatcgcttcgcgccaatttttaacatccggtatcacttggatcacatcttgggtgagtaacgtctttagcatcgatccccctaattaaaatctcactccgctctacctgtcttctgctagtgatattagtcacaaatgatagcgctatctatgatcgtagctcataattgtgatagcgctatcatttgttatttgattaattcaccagcaagcgcaagtacatcatggttttttcccacgacttgcctgagatcaggtagaatcccatcgtcaaattcatagccgttaattaaaaaaatagaaaaatattttgatgaaaaagacacgaaaacgccgtaatacagggcgagtaacattacaagatgttgctaagtatgccggtgtcggttcaatgacagtttcacgcgcattgagaacaccagaaatggtatcggataaattacgagaaaaaattgagcaggctatacaagaattgggatatatcccaaatggcgctgctggcgtacttgcttcgggccaaagtaatattatcgcggtacttgtgccctcactgacagataaagctagtgctacgtttatacaatcactgcaacaagtgctgaataaacatgcctttcaagttttgcttggatgtcatgaatatgaccataataaagaagctgaaattatcatgacattactgcaaagcaatgccgcagcactggtgattttcagttcacaactggcagataaaacctacagcaatatttctcatatcaatattcccattattaatgttgctggctctcatcaacagcagacggcaattaatatagaaactgatttttccgcggctgcctatatgttgactgagcatatgttgaataatggccgcaagcatatcggttatattggtgcccaaatggatagccgtttacgcaatcagcagattaatggctggcataaagccatgcttcatcactatcagaatgctgaccaaaatatcactacctcggatactgctagcatgcaatttggtcgccaggcaattactgaaatgttattacgtcaacctgaactggaaggtgtgatttgcagtcatgaagtgattgccctaggtgtcatgtttgaatgccagcggcgtctacttaaaatacccgctgatttggctgttgcttgtctggatggttcagataactgtgaccacacacagccaacactgacatcaattcgcattaattatccccaaataggcagggacaccggaaaattactgataaaactgctcactcaacaaggtgaagatgaaacaaaacatcaaaacaaccgatatcacctattttcatataagttcgagcctagacaaagtgcttagcaaaatgataacgccatgatgagacatcaattgccattaaagccgctaactgtggtaactattttatctgctgactgagatcatgtggcgcgaaaggaaagcccgcgcaatcctcaaccctattgactatgtcagccaccgtcgtttcagctaaagcggtttctagcacacaagtaacacgcgagaattcatcttctaatactggggtgatattgtgcccaatataacacttgggattaggtttagaacggtgcaacgtaaagtacagaggatcttcaactgcgcgataaatatctaataatgagatttgattcgacggccgggcgagtaacgctccgcctccttgccccatttgtgaataagtcagaccagcctccgcaagggcacctaagagccggcgaacaaccgtcggattagtattcacgctttttgcgatatcttcagaacgcacggcttgtccgtggtgaagcgcaatatcggtgagaatatggatagcaacagcaaaacgggtagatgttggcactggaggatcctgtataccttaaaggatgttatggaagaatagcagagcgtgaataaaaagaccgcgtagcatgtcactaatttcgtcacataacaagaagtaaaattcagaatgttaatttgtctgattaacattcctactcctcccgttttgccgccgtatgctattgtttggctcagttaatgttacaaacatgatagcccatattaccgaatggaataatcggtatgagcacgctcaatttgaagcgtatcggcagtttgttgtaatttaactagctgcccatcccgcactgtccatatatgaacgaaacgagcaatgaatcgtttgccacgcttcacccgtcccaaataattacccagaacaatgacatgatcatttgactcaaaatattcagaaccatctacaacgaattcatcaacatcattaagaagtggcacaaagaaattattcaatatatcttcaattccttcataaaccccaccataccgagatccttcagtaacatcccaaataacatcactcgccataatctggcgaagaacatcaatatcacccgtagagtcataaaagcgacgaacaatagatacatttaatgaatctgacattatcattctccttcaaattatcctgcaatgaaatatggccggctcttataaaatgagccggccggatatcttgggacgttcaaccaaaaagcgccattaaagctttaaattaacatccccggaaaacaattcgaacatctttcatgttaggctatccattgcgggtaagatatccccttacttaggtaagcgctggataatcagtatagcctatagcaccaggaaccataaaagtttccggttgttgttcattaaatggcgctttaactaaaaaccggtgaggtaagtctggattagagatgaataattgaccaaaagccactgcatcagcccgaccgtcagcaagaacttgctcggcactttctttagtcagttcctcgttagcaatataggttgacccaaaagcctcttttatcaccttacttaagtcaccatcaacgacagcatcacgtgaaaagataaaagcaataccacgtttaccgagttcacgtgcgacatatccgaatgtcgccacaggattggaatccgccatagagtaatggccaccacgtggtgccaaatgcataccaacacgtgatgatccccaaactgaaatacaagcgtctgtcacttccagtagcaaccgggcccgattttcgactgaacctccgtactgatctgtccgcagattagcattatcttgcaagaattgatcgagcaaatatccattggcaccatgtatttctactccatcaaatcctgccgttttcgcattttccgctccgcgtctgaatgcttcgacaatgccgggaatctcctcagactcaagcgcctgcggaaccacgaaaggacgttttgggcgtaataagctaacatgaccatcagccgcaattgcacttggtgccaccggccgttctccattaaggaaaacagggtccgatatccgccccacatgccaaagctgtatgaaaatacgcccaccagcagcatgcacagcatccgtgaccaaccgccaaccagcaacttgctcatctgaccaaatacccggcgtattctcgtagccaactccctgcggagtgactgaagtcgcttcgctgataatcaaaccagcagaagcgcgctgagcataatattccgccatcagcgcattagggacacgcccttctccttctgcacggttacgtgtcagaggagccataatgatgcgatttggcaagtcgagatcaccaatgcgaattggatcaaaaagtgtaggcatattttttctctcatatagattaataaatgcacttcgttgcaaatcatcaataactgcatagccaggtcataccagaaacaaacagtgttaattaggaagtgtgaactctttctcttgattctgttcccgagtctttagtagcaggcggcttctctggcatgaatcaatgtaacttacacagttacatattgcaacaggataaaaatgtcagatgccagaatatctgcaagataataatgttatgacacaacaatgactttgcttaagaatgacataggccatttgtcgcctttgatttaagtgaatagaaattcgttgaatgagtggtataaaaaaggctacgcaatacgcagccttgaaacattctttaatgaatagaacccctatccaatgagttttaaatccgcttttctgtgtcgcttttgttcctgataaaaattttcatgagagccaaagttcagcaggtataactctattttcccttcaacccaacaataaccaagcaatgttaactggttatttaactgaaagttatgaactcgaaggaaacttaaatcacctttcttctgctcaccaatttcagggttatcaattattctatcaatctcatcttctactatcctaagaagatcctcagataacctggataatgccttagaaaaacgtcttgtttcataaacatcaatctttggatctttttgtccttctgacataacgcgacaccttaccgctattgacttcgctttttgccagtaaagaatcaaggataaaagagtacggcaaatcagggttatcctccgcaatgcggccaatcttagcccaatgctcgatttgcttaggtacacttctgcttgaagcttctgcatgaatttttacatcattcacgaaatcatcatccaaacgtatactgatagccataatttagtttacccctctgggattttgtactccatgcgatataaaacgcatctgtataaaatgcaacattttatcgcattatgcaatcattgattacgatttcaacatgtctattcccgtgatacaaaagggaccccctcaaaatcccctgctcaacgtaataaggcacagcaagaccaattttattctcatcctcaataaaactggtctcattgaattgtcaatatcgcctgaatttcggacatatgattcagaaaaatcgacttattccccctttttgaggattaaatgtctgaattccagcccgattaagggacaaaaaagccaagcaatgcgcagccttgaaatattctttaatgaatagatgcaataaattaagtttgaaaatacgtgatcccagttttatcttttttagcctcctcctatcaaaaattgattatgattataaatgggttgcctgatgctggcagactgttagttgatatgtaaaaaattgttgcccggaggatgcatatatgaatttattggatggtttacaaaaaaaactggacggttactttaataaaacaagtgaaatcaactatgtaaaaatatttgatactccccaaatatgggggcttccttttggaaaagagataatgccacaggcggttaaaagagcagcggaatttgaagatgctattgtaagcattctggaaaacatgcgttatcgctgtgatatttcctctttaaatgccccggatgcagagtggagaaaagttatcctatcagctattgatagcgcatttaccaaaaaaataaacaggaaggagagaactcagataaggttcttattcgctcaaacaccgacatctttgttaaacggtgtaaattcatactttgaaggtacccctgaatatctggcattgaaggaggatattattaaattaattcaagaaaggagagatcattgggagtgtgtacctgaaatatggattggtcggttttaccggatagtagacggacttaaagtatcattagagaagaaagtactgccagaggaaatgtttccagaagatgataccagaatgacatggaatcatacaaaaattatcgcagttgatggaattgagtcatttgtcggcggccataatttaaatatggatctgtttaaaaattaccctccagttcatgatgtctctgttaaagttataggaacggcatcattaagctcacaattatttttaaataacatgtgggtggctgatacagacctcttaacaaaagaattctttgatatagataaaaatagatgggttaatgcaaatggtattgtgggaaagccggaagatccattaaaaaaagagtacgttactgaatatatcgatagaaaaaaagaagagagcctaaaaaatccacctaaagacccagaatataagaaaacaagcaggatattatccgtaggtaaatattggtctggacctgatatgcgaacggattataaaaaaggctctgaaataatgaaagagtttataataaagaatgcaaagaaaaaaatccgcatgtcccaacaggatcttgtcagtgcatggaaaaaacaatggcgagatcatcatgtgtgccgatggttgatcgaagcattacttgccaaccccgaactggaagttcaaattgttgtatcgccacttgatgcagcagccggtgctgctggtgatcaatattcttttggttctggagccaaaagaacgtttgaaatatttaaatactatttgacacatgatgagcataccgataagaagctggaagatccggatggaatcaggcaagccgcactgaaaagaatagaggttgccccttttttctttacagacaaagtacctgaagatcttttgattgaagggacgacatacagatggccaaccccggatgaaaattcttatactgctacgctaaaagaaccgtctctttctgaaagacctccacagataggtgctataggacgcccattccgatccttaattaaagcaagtggtccggtatatcccaaagttccccctgctcctgggaatcatgcaaaagtaacaataattgatgatgaactctacgtggttggttctgataatctctatccggggtatctttcggagttcaattatcttattgagggagaagacgcggtgaaagcttttatagaatcctactgggaaccgttgtggaaatattcaggaacacattcatttaattacaaaaatacttgatgtaaataacaagtgttctgatatataccctatggatttcaagatgcatcgcgacggcaagggagcgaatccccgggagcagagataacgatgtgaccggggtgagtgagtgcagccaacaaagaggcaacttgaaagataacggatatattcccgccaactgctagcgggaatataacttgaaaaacattaaagaaatgacttttcaggagaccaattagatcttggctgtcgccaaatattttgtcatttcatcatcgggtaccataccaccaccggttgcccagaccaaatgcgtagcctgtttcatcttttctgctgaaaggttcttattgttcaggtaatcaaggtttccactcacacgagcagggcccgccatcccaactagcgccgaaggctctaaccggataccttcatcacgatccagtaagcccaacaggttatacatttcctgatcttgaacagtataaaatccatccagcaaacgttccatcgcacgcccaacaaagccggaagccctgcctaccgcaagaccatcagcagcagtgatattgtcgatcccgatatcctgcacgcaaatattgtcatgcaaaccagtatatacccccaacaacatactgggagaatgggtcggttcagcaaaaatgcagtgcacatgatcaccaaaagccagtttcaatccaaatgcaaccccccccggaccgccaccgacgccacacggcaaataaacgaagagtgggtgatcttcatcaaccacaatattcatctgctcaaactgcgcctttacccgtccacctgcgacagagtatcccagaaacaacgtttgggagttttcatcgtcaataaagaaacagttaggagcagattcggcttctttacgccctcgggccacggctaccccataatctagctcatgctccacgacattgaccccatgtgaacgtagcttttgcttcttccattcacgagcatcggcggacatatgcacgctgacattaaagcctaattttgcactggcaatacctatggaaagccccaaattgccggtagaacctacagcaatgctgtattgattaaagaaccgtctaagctcttctgaaaacagtttgctgtaatcatcgttttcagcaagcaaccccgcttgtaatgccagtttttccgcgtgagttaacacttcataaattccaccacgggctttaatcgaaccggaaatgggcaaatggctatcttttttaagcaaaattctccctgtgatacccacaccataatgttgctccagtgttttttgcatcgtaggtatagccactatttctgattcaataatgccatgtgtgacggctgtttctggaaaagctttacataaataagacgcaaaacgatccaagcgtgcttcagcatcctcaacatcatcagcgcccaaaccgacaaaaggcaatccctctttcaaggtggtattacaagggttaaaccagaagatttcctctaattccatcaaattttttactaacggatattcatttagtaattgttgaatttcagtacgtttcatatatgtattaacccaagataagtgtttccctggtatatacccattatctttcaagttgcctctttgttggccgcactcgctcaccccggtcacatcgttatctatgctcccaaggattcactcccttgccgtcgcgatccatcttgaaatctataggatatataaaataactcttacttgcttgattattagaattttttattatattcaatatgttatgtttactacaacttcctacaatatatcagcacatcatactttacccgttatctttcaagttgcctctttgttggctgcactcactcaccccggtcacatcgttatctatgctcccggggattcgctcccttgccgtcgcgatccatcttgaaatccattgggtatttatttattttttatcttccccttattttgattactacgttaatgtttatacccgttatctttcaagctgcctctttgttggctgcactcgctcaccccggtcacatagtttgctatgctcccggggattcactcccttgccgtcgcgatgcagcttgaaatccgtagggtatatcttatttattattttagatgtaaatctgcctattttataggcttccctggtattgacacttcgcacttcttattcttatttttcaagctgagcgatgacttctttccattacataatggtagccactacacgatggtagaaagaagaaacgtcccaaccaacgcaaccacagaggcaataaatgttgcggttgtataatacttaaaagtttcactgagcgttgttccgcaatattgcttaaccaaccaaaacagtgaatccgtcacaatagtacagccgatagcaccagaaccaatcgccaatgtaatgatttcagggctaatatctggatataacggcaacataggcgaaacaatcgctgttgcccccatcattgcgaccgttgctgaaccaaccgccgcatgcaaaataatggcaaccaaccaagacaaaagaattgggtgcatatccagactcgacaaaataacggccaacgtatcactaaggccactgacttttaaaatactattaaatgccccgcccgcgccgataattaataaaatattggcgatagaagagaaacaatcttccgtcttcgtcaacagtgtactcattcccatattttgcttaatgcccaaggtgtaataggcaacaaacgcggcaatgaacatggctgtaataggattaccaataaattccagcaccgtataaaacgtggtacctttttccatatttaattcagcagccgttttagtcaacattaacccaattggcaataacacagtaaacaatgtcatgcctaaagagggtaaatcctcttcttgacgaactgcaatttcagaaaattcagccggaaccgatttaaaaggcagacggctaccgagaaatttcagaaataatggcccccccaccaaagcggcaaacaggccaactatcaacccataaacaatcaccgagccaatatccgcacccagtttattcgtcacaaataatgcagccgggtgcggaggaataatacagtgaaccgccatcaacgctgtacataatgggatcgctaatttcagcaatgatgtattggttttcctggcaatagaaaatgccaatggaattaacaataccaccccgacttcaacaaacagcgtaataccacaaaccaaaccaatcagtaccataatgatatcaggtgatagccatcggcatttttgcaatgtgataccaatccgctctgccgcgccggatatctccatcatcttaccaagaatggtccccagaccaatcactacggctaaaaaacctagcgtatctccgattcccccttgaatggcgttcaccatttcaacagggttcattcccattaaggcaccgacataaaaactggctaacaatagagcaagaaaagggtgaatttttaatttaattatcgtaaatacaattaacgcaatacttgtgagtaacgtaccaatcacccaaggttgtgaatccacttaatcattccccacagttaacctttgttcgtcacgcgaattttcattattgaatatgaatattcaatttttgacaaatgattaatacatagccatgcatgaatcagattgagccaattcagtgataccgatcaaaattttcactttatttgcgatttaaatcactaaaactatctgaaacataccgccttaatgatacggttatattatccgtcgtcgatgaactagaaacacgataaatatgtacacagatgataatttcatggttgtaaataagttactcaatggaagccagttatcaaagctgcatacatttgagatagccgctcgccactgctcttttgttctggctgctgacgaattagctatcactgccagtgcggtcagccatcgaatcagttctctggaacaagagttaggattcaaacttttccagcgttttcacagaaaaattgaattaacttgtgaaggaaagcgtttattttggacaattaaatcaacgctggaacacctaaatcaggaaattctggaaataaaaaatcaggagttatcgggtaacctgactatttactcccgcccgacctttacccaatgctggttagtgcctaaattagctgattttaatcagctatacccatccattaacctgaacatcttagtcggtaatgaaaatgtgaatttccgcggttatggtatcgatcttgcgatctattttgatgatattatatccaatgaattatcacatcaatatctgatgagtgagtatattaccccggtctgtagcccgcagtatgctgaaaaacatgatctaatgggaaatattgacaatctacgatactgcacactattgcatgataaacaagcatggagttacgactctgataccaaagagtggaatacttgggcagaacactttgacattacactggagccatcacaaaagtgtattgtcttcgatcgttccgatttagctgccgttgctgcaatacaccatgcaggtgttgcaatgggaagaaaaaatatgatttgggaaaaaattgaaaacaatgaattagtcgccccctttcccaacactgaagtattatgtaaacaatattactatacctgtaccctgcctcaacaacagaatgagaaagtcaatgcctttatccaatggctaaaatcaactatagacgaataaaaatatagccaaccattaacggatataacaaacctgctctattttaagtggcgacatgttagtcgccacagaatttagcaacggattctaccgtactttcaatcctattatttatacccgttatctttatcactatttctgtccttaaaaaatcagtaataatgtaattatttgaaaataacatctaaatttaatcaaaaaatatatactcatggtgtaagttatgatattcatcacaactgctagtaagcaaatcgtttaaatgcgttataaagtcgtttattttagaagtatatagagtgtaatgaaatgcaaaaattgttattaagctgtggagttatcttttctgtatctgcgataactttacctgctcaagcagaacaacatacagcttcaatcggatacgcctacgtgaaaccacaagatgtaagtgcactaaatggtgcaacattgagttatcgatatgaacttgatgatcaatgggggctattatcatcatttacctttgctaaaggagatgaaaaagagacaaaatattacacaggggaggacttgaagtactattctgtaatgattggcccaacctatagaattaatgactacattagtttatatgggcaactcgggctatccagaataaatgataaatctactgcccactatagtggtggatatatcgagaaggaatcaacaagcaaaaacactttaggttggggagcgggctttattatcaacccaacaaccaatacctcaattactgccggttatgaaggtagccgttttagtattaaagacggaaacgagaaagatcatttatctactaacggttttaatataactgtcggctatcgtttctaactttacccaatggatttcaagatggatcgcgacggcaagggagtgaatccccgggagcatagataacgatgtgaccggggtgagcgagtgcagccaacaaaggaggcaacttgaaagataacggatataatcaatgagcaatgtatcatcaccaaggttgaatattttattcgattgacaaccttggtgatttgtctaaatattaaatcgccataactatttataataaatccattgaatattatcataaaaaattgaatagatgaaagaaaaataatttccaaacgttgaatatatattattcaaatatatttttatttacaatacttttgattttttatttccatcaacaatataaaaacagttaatcttctgatctaataaaaacatatcattattctttatctgaactagactatggttgatacaaatgacaagaaatcatttatacaacaatttaatatatttataccctaaagatttcaagatgcatcgcgacggcaaggaagtgaacccccgggagcatagataacgatgtgaccggggtgaacgagtgcagccaacaaagaggcaacttgaaagataacgagtatattataaatcaacattatttaaggaatatatatgagccagaaaaatgattttaaggcgttttctattgataacaatgctaatgtagtgagccaagaaagatatgaagaaagtctgaatttgaataccggatttcaaccagataatgttcccactcacttgttaaataaagtattacgccagtcttcgacgatatcatctgtggtagctaattttatcgcaacacaatctaacaatgatattctggatgatggaaatataactaaacttactacacaattacataaagcattagaacaaaaagtcacaacagcaataccaaatgcctcattaacccaaaaaggcgttgtccagcttacaaatgttgtgggtaatgatgatacattagctgttacgcaaaaatttgctcagaatatcataaattcattgaatgaaaatattaatggtaaagtacccaatactcgtaaagtcaatgggaaggtgttatccagcgatattaacctaactgccggggatgtaggaagttacgataaatcagaatcagacgagaaataccaaccacgtggtaattatggtagtagaaacacggcttctttaagaactacaaatggttggtggcggtgtggtgatactgggctaatttatcaatggggacaatctcctgaggaaattgatgaaacatctaatatttattatttccctattgtatttccctctacttgtgctatcggagtagcaacacccgatcatcataagatagaagctggtgtcatttccgcatattttaaaattatggataatgcgagatttaaattaactcttgatcaagcttcaaatgatcaatcagctaaagttttttggtttgctattggatggtaaggaaatagatgtgtactagctcaagactgaattacaaaattgaaagttaccgatgatttataccctaaagatttcaagatgcatcgtgacggcaaggaagtgaacccccgggagcatagataacgatgtgaccggggtgagcgaatgcagccaacaaagaggcaacttgaaagataacaggtatatacagacttcaaatgcaagagctattacctgtatgatatgacaagaaacaaccactgtaagagaaattcagaagatatgtgtatttatcaccaaatcatcttaagagcatgcaaagaatattaaatcagagattatgacatgaataagttacatagaaaaataagttgtcagtgaaatatttacaactcattcatttaattggtgggttgtcgggggctcgaaccccgggccaattgattaagagtcaactgctctgccgactgagctaacaacccaatatggacaattattccccgatacaaagctgtcgtcaatatattatggctatttttttctcggcggagaattcatacccaattccaacagcattaacaagttaaattgtaaccaatttgtttttaaagtgagatcaggctgttattactatagtaatctgtgtcacaatattttttgcaaacatcatcatatataaggccacttaaagagccgtaacaatttacctaagaaaatattggacactattactatggcagaaaatatacacacttcgctttccactaaaaccggggaaacgcagttgcaacgcaatctaagcaaccggcatatacaacttattgctattggcggtgccattggcacgggtctgtttatgggatcagggaaaacaatctctctcgccggaccatcgatcatattcgtttatatgattatcggtttcatgctgttcttcgtgatgcgcgcaatgggagaactactgctttcgaacctgaattataaatcattcagtgatttctccgccgatttgctcggtccttgggcaggttttttcgtcggctggacttactggttctgttgggtcattaccggtatcgccgatgtagtcgcaatcacttcctatatcagctattggcaaccagactttccacaatggattacttccctactctgtgtttcactactgctctcccttaatttggctacagtgaaattattcggggaaatggaattctggttcgccatgataaagatcgttgccattatcgctttaatcgcaacaggtgctgttctaattggcatgcattttcaatctccagccggtcataccgcttcactggcaaatatatggaatgatggtggattctttcccaaagggttaagcggattttttgccggatttcagatagctatatttgcctttgtgggcattgaattagtcggcacggcagccgcagaaactaaagatccaatgaaatcgcttcccagagctattaatgccatcccgattcgtattatcaccttctacgtgctggcgctgataattattatgtcagtcacaccgtggcgttcaatcattgcagacaaaagcccttttgttgagctgtttgttctaatcggtttacccgccgccgccagtatcgtgaactttgtggtattaacctctgccgcctcttcagccaacagcggagttttctccaccagccgcatgctatttgggttagcaaaagaaggtgatgcaccacagcaattcagccgcctttcacgccgttctgtacctgcatcggggttaatcttcacctgtttatgtttatcctgtggtgtggtgctgatttatttaattcctgatgttatgcatgtatttaccctagtaactaccgtttcagccattctgtttatgtttatttggagcatgatcctatgctcatatttggtttaccgaaaacgtcgcccggcattacataaggcttcaacctataaaatgccattgggtattatcatgtcatgggtctgtctgacattttttgcatttgttctgatcttactcactttacgggatgatacccgccaggcattaatcatcacgcctgtttggtttctgatcttaattatcggttttcaaattgtaaaaaaacgtagaacacgtttgtacagctaacttattcaaatctttaatatctatatgacctgttggaataatactccacaggtcttttttattgctgcaagctgaaaaattaccactacacttaactccatcggttaagaaaatcttccttacaaaagcattaggcaattttcataacgtgagcatttcacctcattccatcaataatatttacccaatggatttcaagatggatcgcgacggcaagggagcgaatccccgggagcatagataacgatgtgaccggggtgagtgagtgcagccaacaaagaagcaacttgaaagatgaagggtattgatgaatttaaataacaggctgctattattgtaaacttcgcagccactttttaaccttgtaggagaaagtaatatgacaaaaattcttgtgctttattattccatgtacggtcatattgaagcgctggcatccgcagtggcagaaggcgctaaaaaagtcgctgacgtagaagtcacgattaaacgcgtaccagaaaccattccaccagaagcatttaccaaagcaggtggtaaagtagatcaatctgctccggttgcatccgtacaagagctggttgattatgatgccataattatcggcaccccaacccgctttggtaatatggccggccaaatgagaaactttctagatcagaccggtggcctgtgggccgaaggtaaactgtacggcaaagtcgctagcgtcttcacttccacaggcgttggtggtggtcaggagatgacgattacttcaacctggacaacgctcgctcaccacggctttattattgtaccaattggttacggtattcctgaaattggcgatatttctcagatgcagggaggaaccccctacggcgccagtactattgctgacggtgatggttcacgcatccccaacgaaaatgaattgaagatcgcccgttatcaaggtgagcatgtagcaaagatcgctaaaaaactgaaagattaacatgataccaaggcgaagagactgagctaacgcgccagacgctggagataagttttactaatgcgatgcataaacccactttccggatcggttgtgctcaccttcgtctttttcttccatccctttaaagaaatctggtgcactattcttatcaacaccatgaataacaaaaacatttttggcgctactgcgccagaggtcatcaccagtcagattgatgtgctcccatcccagcggggacaggcattgtaacagttcgacatcaatagcctgaccgtgttcacgtaaaaaggctgaaccgaaaaatgatgagccattccaaatgcacgataaggtcatagggacttttattgaacacgaatattacatttgataggcaatctaacttttaaatacataaccatattattaaacttttttattttaattttattaaagtcaaatttcagttcataagtattttctttaaataaataaaataataaactaaactaaatttttagattaaaatatttacttttgtcattaaagtccatgtaagcaaacatattttaattgtaattaaataaaaaggttttcataacattaaatatatagttaaatttaatttaataaatcaccataactaatggataacaatatgttattaaatcaatctttagaagaaaataaattacctaactcagaagttcccgctgccactttaaatatattaaccggccaagtgcaaggagcagcccgttcagcgggaatctttactaaagaagacctcattaatatcaaattatatgttaaaaatggcttggaacttccttttactttgccgacggtaaaggaatatattcattacaatgatactaatattgagggtttgaaacctgaaaatattaagactttatttgaagaaattcataaccatgcgcttagctggagtaaggtagaagataaagtccaacagcagagtatcgatctggaaaatgcaggaaaacaaattacccaaaagggagagtcaataatcaaaatcattgaaaaaatgccgattacagacagtatagaaacattaaaaaacacatacaataatcgcaaaccaaccaatgagcaattattcaaaataacttataccgatgttgataaaaaagtagcagtcggattgaaaagtatcctagaaagcatggagaaagatgtaaaaggatatagggagaatagccagcaagttaaagatgcaataaccgactttaaaatcacactgtttggtggaactttatcagatggcaaaacagctgatggattactgccacaggttgataccaagaaaaaactgatggatgataataatctttctacaactgtcaaagagctgcaagatgagatcaatgagaaaaaaagagatattgagcaactccaaaaagactatgatcaatatgttaaattgtcattgtctggcgcgattagtgttattggcgtggtgattaccggtagtatttttggtcctaaagcagaaaatgcgcgtaaacagaaaaatgaattgattgagaaagtcaaagagttacaagagcaaattaaaggtgcaagcgcattacaaacggcactccaaaatttatccttacacttccttaatattcgttcctgtatgcaagatgcagaagttgccctaaaacacttggatgtcatgtggagtacaatgctagagcaaattaatctctccaaaaagtcgtttgctgaaattgataatgcatcgatgcttttaatgtttgaggaaacatttaaacaagctattagcccctggaaagaagttcaaggttctgctgaaaaattggttaaaatttttgatgaagcattggcggaatataaaaaacgttctaaataatttcttaaattaatttataaagtaaaaaaggaatattaaaaagtgtctgaaagcatcatctcacaaaaagaaatccagtatccaaaagttaatatcaaatccttggatgagactgtaaataaaatttggcttttggcaaaacaacaaacatctggtattacagctattgcagagaaagccgagcgagtcagctcctatagccgtgaactcagtgaattggtaagtgaatctttatcaaaattaccaccaatattaagtcaatttttagcaggagatattttccaatcaatccgtaaaattgataaagccctggaagcccatgatttgagtgatgagaagcgcagtgacatactaaaagcacgcgatcaatttattcagaaattatcaaaagatattgacaatgtgattgctaatttcgatgatagaatcaacaaactgactggaaaaattaatgatattaacgatatagtgattgcagggcattttgaagatgtgttggcaaaaacaaaaaaacaaaaggcagaattgcagagtgatattgaacagaaaaccaaagaaagaaaaaagttagatgccgaacgggataaaattatcgaaagtcaggatgttattcgcgcaaaaaatattgcggatatgtttaaagattatctcccaaataccaatgacatcgatggcctgaatttcgctcaacctgaaaaagaaattattaaacaaagtattgagatagtaaaaaaagtattgggcaaaatttctgaaggattgaagtacatcgatttggaaaatgccagaatgaagctcactgaacaaattgatcataccatgcaagaatccaaggcactaaaaacgacattagaggaaacagagctgaggctttccggtttaaaagatgtgatgcaaatcgatacagaacgcaccactatgcttaacgaggtaggtaaactagaaaaagcatggcgtttattctccagtcaattacacgaattatcagataagaatattaatcaggactatctaaccaatctgataaacggacaattaaatttcttggataatttggtaatatcaatataatatgttgaaatagaaataaatatattggtaacgtcaacttcgtttaagaatagcgatatcagaatcccgtaaattcaagctcggttttttaggttggaatgtataagcgattaggcctgcagcgacttccaataaaaaaccgagctgactacggtgccttgaatgctcatctaagaaatatttttatgaaataaaatgaggaacatcatgatttcattgagagaaagggaagcttcgcgatgacatttgagtaatccattttcaattaaatgctaatcacttaaacccattcagtcacgcaaaaacgacatatcacgatctttatcgaattcaaatatccaaacactttactcttgaattgaatatgcctttcgaaaaaaactattattttttcaatataaagttgtttattcatgcttatattcttattattgaaattgatatcattacattgtcaatatacatattaaaagagtaaccaagtaaacaatttgctttttaacaattcactttttaatattaacgcaaaaacatcaccatttaataagaccttaacttaaatcacataaatataataattttcgatctaatatccctccaaataaatgatatcgataatatccaaataagagggcagatcatgaaagcattagtattagaaaaagcaggtcagatttcaattcaagactgggaaacccccgaaatattgggtgaaaatgatgttgaaataaaaattcactcggtggggatttgtggcagcgatgtgcattattatcaatacgggcgtattgggccatttattgtcgaaaagccgatgatcctcgggcacgaagcatcaggtgtcatcaccgcagtaggtaaaaatgtgactcacttaaaaatcggcgatcgtgtctgtatggaacctggcattcctaatctgcaatcaccacaatcacgggcaggtatttataacttagatccagaagtgcgtttctgggcgacgccccctattgatggttgcttacgtgaaagagttattcatccggcagcatttacgttcaaattaccggataatgtcagttttgccgaaggtgcaatggttgaaccattagctatcggtatgcaagccgccacaaaagcagaaattaaaccaggagatatcgcattagttattggtgctggcacgatcggaattgttaccgcacttgccgcattagccggtggttgttctgatgtcattatttgcgatgtgttcgatgaaaagctagaaattgcaaaacagtatccaggtcttcacccggttaatagcaaagtacttactgagaaagtgaatgcattaaccgagggtaatggcgtcaatattctctttgaatgtagtggcgcaaaaccggtcattgccactatttcagagcacattgcaccgggaggaatagctgttctagtcggtatgcctatcgatccggcaccatttgatgttgtctctgctcaagctaaagagatcacattcaaaactattttccgctacgcaaatatgtaccctcgtactattcgtttacttagctcaggtaagctcaaagtaacccctctattatccgcaacctataaatttaaagacagcgttcaggcgtatgaacgagccgcggagggtcgcccgacagatatcaaaattatgttggaaatggagtaacacatggcgctctatgctggtatcgattgcggtacacaaagtactaaagtcattattgtcgatagccaaaaaacgcctattttgggtgaaggcagctcgcctcacccaataattagcgattcaaacggccgtcgtgaacaacaggttcactggtggacagaggcattggaaagtgccttttctcaagcgattgagcaagcaggaatttctggtacagaaattgccgctcttgccgtatcaggtcaacagcacggttttgttcctctggatgcagaaggtcatgttttagcaccggtaaaactctggtgtgacactgaaactgcggccgaaaatcaggaaattattgatgcacttggtggtacccaagccactttagcacaactcggattaatgccgcagacaggttataccgcatctaaaattctttggttcaaaaaataccgccccgagttatgggaaaaactgaacgctgttttattacctcatgattatctcaattattggctaacaggcaggttagttgccgaatatggtgatgcttcaggaaccggattactgaatattcgtaaacgcgaatgggataaccaaattgcccaatttattgatccagatggtcgtctttggaatgcactgcctgaactggtttctgctgagacctgtattggcacagtaagacctgaaatagcaagaagattagggctttcaccgacaaccaaagttgcatctggtgggggcgataatatgatggctgcaattggaacgggtaatatcattccgggcatcacgaccatgagtttaggcacctccggtactctcttcacttactctgacaaaccgattgtcgctgattctgaaatgatcgcgggtttctgttcctctaataatggatggctaccattgatttgcacgatgaatgtgacttcagcgacaaccaccattcaaaagctgtttaatatggatattcagacttttaatgacacattgaaccagagcaaacccggtgctaatggtttgatgatgctaccgttttttaatggtgaacgtgttccaccactcccccatgccaaagcgagtctccataacctgaatactagcaatatgaatcaacaaaatttcattttggctgcggttgaaagtgccacgtacggactacgttttggcattgaattatttcgcaagcaagggattgaaattaatgagatccgtttgactggtggcggcgctcgcagcaaaaaatggcggcaaattgtggctgatgtcatgaatacgcctgttatttgtgtcactaaccaagaagctgccgcattaggtgcggctattcaagctatgtggtgtgattccttgacagaagagaaagataaacaaatgcagctcgcccacttttgccaacattttgttcatcttgatgaagagacccgcaccattccaactcccgaaacggccgcattatatgatgtgttttatcaagattatttatctctgctgactactgaatatccagaggtgaaaatatgacgacatatttttcatgatgaaaaaacaaacctcgctattttaaacgaggtttgttggttacctttattccaatttaccttatttagtcttgtattgcgcctcagcatcaacaaaacgctgttgcgctgcgctgctcggcgctttgcccaacagactcacaatcacgatcgcaatcgaagccaagataaagccaggaataatttcatacaacgcaaaccactggtatttcatccacaccaataccgtgacggcccctaccaacatccccactaatgcgccattacgtgtcatacgtttccagataacagaaatcagtacaaccgggccgaatgcagcaccaaatccagcccatgcattacttaccagagccagtactttattgtcgggattggttgctatcaccatcgcgatgaccgccaccagcagcaccatgaaacgccccacccataccaattctttctggctggcagatttacggataaagggtttataaagatcttccgtcaaagcacttgcacacaccagcaactgacagcttaaggtactcatcaccgcggccagaatagcagagagtaaaatgcccgctatccacggattaaacagaataaccgccaattccataaagatacgctcacggttggctatgactgggccagacagttcaggatgcatttcaaaataagcaataccgaagaaaccgacagcaatagtgcctgccaaacataacaccatccaggtcatactgatacgacgagccttgcggatagtgtaatgggaatcggccgccataaaacgcgccagaatatgtggctgaccaaaataacctaatccccaacctaacaacgagataatggcaataaagttcaactctttaaacatatccatataagccgggctttttgctgctatcagcgccagagaggtatcaatgccacccacagagaaaataacgataactggggtcaagataagtgcaaagatcattaatgaagcctgaaccgtatcagtccaactgaccgccaagaagccgccaaggaaagtataagcaatcgtcgctgcggcaccgagccacatagctttctgataactgataccaaacgtactttcaaataacaatcctccggcaaccacgccagaagcacaatagatagtaaagaagatcaaaataaccaacgcagaaataatacgtaggatcttgctactatcgtcaaaacgactggtgaaataatccggcaatgttaacgcattattattgatttcggtctggatacgtagcctgcctgcgaccaatttccagttcaggtaagcacctaaagcaagaccaatggctatccagctttctgaaatccccgcaaaatagactaccccaggtaagcccattaataaccagccactcatatccgaagcaccggcagacaaagccgttaccacgctacctaatcgccttcctcccaagatatagtcatcaaaatttttagttgaacgataagccaaaaaacctatcaacaacattccagtaatgtagacaataaaggtgattagcattggtgtatttactgtcatgcaagttctccatagtgttatctgtgttttgcaaatccgcagttctcccgggtacacagagttttccctgtcaggttcaggaacgttgcacctgattgcacctaaaaatggtccataattctaaattgaaataattatttttgtaaccaattagaaagttacagtgaatcctagattagcatcaggtaatttaacaactaattaacgccattttttacaaaaaacgtttactgaatcacatttatttgctttaaaaattatactttttaaccatttcagggttatacccttatgttagccacaaaatgttaaaccaatgtgtctcaatcaaataaagtcacaagaataaatatatccacctaattataataactagattaatttcacaaaaataaaacaagcgattctcataaggttgcacaaagttgcaacatgtcagatattatcatgcaattttagataaaccttacctattaaggagcaaagatgggtagtacaacaatgggcgtgaagcttgatgaagcaacgcgtgatcgcattaaagctgcggcacaacggattgaccgcactccacattggctaattaaacaagctatttttaattatcttgaacgtcttgaaaatgatgaacagatcgctgaactctcgtccaatcaagatgttaaagaggagaagataatcgcagaagaaacggtaacagattctgctcatcaacctttcctcgacttcgctgagcatatcctgcctcaatcagtaaaacgttccgcaattactgcggcctatcgcctgccagaaacacaagccattcccatgctgttacaacaggcacaattgccggaagatcaggcacaagcaactcataagctggcttacagcattgcagaaaaattacgtaaccagaaaaacagcatgggtcgttcaggtctggttcaagggttattgcaagaattctcgctttcatctcaggaaggcgttgcactaatgtgtcttgcggaagctttactccgtatccctgataaagccactcgcgacgcgctgatccgcgacaaaatcagtaacggcaattggcattcccatctgggccaaagttcatccatgtttgtcaatgcagcaacctgggggctgctgtttaccggcaaactggtttctacccataacgaagctaaactttccaattcactgaatcgcattatcagtaagagtggcgaaccattagtgcgtaaaggcgtagatatggcaatgcgcctgatgggtgaacagtttgtgaccggagaaaccatcgctcaagcgctggcaagtgcacgtaagctggaagaaaaagggttccgttactcctacgacatgctaggtgaagccgctttaactgaggaagatgctcagaattatatggtttcctaccaacaagcaattcatgctatcgggaaagcatccaacggccgcggcatttatgaagggcccggaatttccattaagctttctgccctgcacccgcgttatagccgtgctcaatatgaacgcgtcatgaatgagctatatccacgcctgctttccctgacattacaagcacgccaatatgatgttggtatcaatattgatgccgaagaagcagatcgtctggaaatttctctcgatctgttggaaaagctctgttttgaaccgcaactggctggctggaatggcattggtttcgttattcaagcttatcagaagcgctgcccctttgttatcgatacagttattgacttagcacagcgcagccgccgccgactgatggtgcgactggtaaaaggcgcttactgggatagcgaaattaaacgtgctcaaatcgacgggctggaaggttatcccgtttacacccgcaaagtttatactgacgtttcttatctggcttgtgcccgcaaactattgtcagtacctaatctgatttatcctcagtttgctacccataacgcccatactttagctgctgtttatcatatggcgggccaaaactattatcctggccaatatgaatttcagtgtttgcatggcatgggagaaccattgtatgaacaagtggtcgggaaaatcgctgatggtaaattaaaccgcccatgccgtatttatgcaccagtaggcactcacgaaacactgttggcttatctggtccgtcgtctgttggagaacggcgctaacacctcttttgtcaaccgtatcgccgataccacattaccactggatgaactggttgccgatccagtgacaaaggtcaagaagctggccgaaaccgacggccaaatcggtcttccacatcctaaaatccctctgcctcacaatttgtatggcaaagatcgcgcaaactcagccggtttggatcttgccaacgaacatcgcctggcttctctttccagtgcactattaagttctgctaccgaagagcagtatagcgagccgcgactgggcggcaattatcaccatcaaggtgagttaccggccgccaaaccagttattaacccggcaaccccttcggatattgtcggctatgttcgtgaagcaactgaacaggaagtcagtcatgcgttggatgtcgcaacagaagctggcgcaatctggtttgcaacaccaccatcagaacgggctgccattctggttcgtgcggcggaattgatggaaaaccagatgcagccgttattaggcattttggttcgggaagccggcaaaacctttaataatgcgattgctgaagtacgtgaagcggtcgatttcctccattattacgcgggacagattcgccatgatttcgctaacgatactcatcgcccactggggccggttgtctgtatcagcccgtggaatttcccattagccatttttaccgggcagatagcggctgcattggctgccggtaacagcgtattagcaaaacctgcggaacagaccccattaattgcggcaacagcggtcaaaatactgcatcaagcaggtattccccttgatgcattgcaattattacccggccaaggtgaaaccatcggtgctcttctggtgggtgatgagagagtgcgaggtgtgatgtttactggctccactcaagtggcgagtctattacaacgtaacattgccggacgacttgatgcacaagggcgaccaacccctctggttgccgaaaccggtggcctaaatgccatgattgtcgactcttccgcgctgacagaacaagttgttatggatgtggtcgcttctgcttttgacagtgcaggtcaacgttgttctgccttgcgtatcctttgcattcaagatgatgtggcagaacgcaccatgactatgttgaaaggtgccatgtctgaatgccggatgggtaatcctgaacgcctgtctaccgatatcggcccggtcattgatgcggaagccaaagccggcattgatcgccatattcaagcaatgcgtaccaaagggcgcacgatttatcaggcagcacaagataatgtggtcgacaatcaagagtgggatcaaggcactttcgttaaaccgacactgattgaactggaaagctttgatgaattgaaacaggagattttcggcccggttctgcatgttgtccgttttaaacgtcatgaactggataaattactggatcagattaataactctaactatggtttgacccttggtgtccatacccgtattgatgaaacaattgcacaagttaccgctaaagcgaaagtcggcaatctgtatgttaaccgcaacatggtaggcgctgttgttggcgtgcaaccattcggtggtgaaggcttgtccggtaccggaccaaaagccggcggcccactctatctgtatcgtctgctctcttgccgtcctcaaaatgcgatcaaccaaacgttggaacgtcaggatgcggaatatccactggatgctaatgttcgttcagcgctaatggctccctttgatgcgctgacagaatgggcagccaatcagcacaacgaagagctaaatcagttagttcaacaatataaattgctggcacaaggtggtaccacccgtctgttgccggggccgaccggcgaacgtaatacttacaccctattacctcgtggtcaggtgctgtgtctggcggataatcaacaagatacattgatccaactggcagcaacactgtctgtaggctgtcagttgctatggcaaaatgatgaattacatcagcaactgtttcgtcaattgccagatagcgtccgtaaatcaatccatttggttcaggactggcagagtgaagatacggcattcgaagcggttatttaccacggcgactctgatcaactgcgtcaagtttgcggacaagtcgctcaacgtaaaggcattatcatttccgtacaaggttttgcccgtggagaaactaatctgctgttagaacgtctgctacatgaacgttcactgagcattaacaccgcggcagcggggggtaatgccagcctgatgactatcggttaatttcggctgtagctaaggggaacacatcaaatgtgttccccaaaattaacatctctttgctgtttatatttccagcttagtgaccgccctgttgccagctcaaatactgttcatacttgcgcaaagcaatgttgtagttactgaatgctgactgtgacagcttttcactcagtttttcctgaattttctctgttgtgaactcttttacagggtaattgcttgaagtgagcaattcatccaaacgtcgtaaacgaaccacatactcacgaacagtactatgactcatttcagtctgttcaaacaggtactgtttgaaagacatgatgtcaaaataatctgtctcgctattgcaataaatctcactgcaaaaacgacataacgcgacaaatttatcttgcagctcatcccaagtcttgtcatcaatcaactccgtcatctcggagatggactctttgttgatcacttggccattaaaaaccaaagagatacggtcaagagctttgtgacaatgcaagcaatgagtttgactatgtttgtagtctttaatgtaacggctgagcggccgtttcttttgtgttgtaacagacataagagataagccctgtgtgtagtcttaaacaaaaaacaaataagcaaaaaagttacttttccggatttaagcgtgcccgcaagcgtttaatcgcctggctgtgtagctgacttatacgggactccccgacttcaagtactgcgccaatctctttcagattaagttcttcctgataatacagcgtcagaaccattttttctcgttcaggtaacgaatcgatagcttcaattacccgttgacgaacgtcactttccagcaattgttgtaagggattagtttcatgcccctcttcaatgacaggttcacagctttcaccatgcatttcatgccattcatcatacgaaaacaactgactgttattcgtatctaacagtatctgccgatattctaccagatcaatctttaattctttagcaacttcctgctcactggctggacggcctaagtcttgctcaagtttacggatgatgtgcgtcacttcgcgcgcattacggcgcacgctacgcggagcccaatcacggctccttaactcatccaacattgcacccctgatgcgttgtaccgcataagtggtaaacgcggttccttgtaaggaatcaaaacgttccaccgcatttagtaagccgattcccccggcctgaagtagatcatccagctccacacacgcgggtaacctaacttgtagccttaacgcttcatggcgaactaatggtacgtagcgcttccagaggctgtttttgtccatcacgccttcggcggtatacaaatcgctcacaacaacagacacctttggaaaaagagactaaccatcattatccaatcccctaacaagggcaatcgtttgaacaatgtagtaaaaacacttctttttcacctatgcgaaatttattgtctgcctaatagtatcacaaattttaggctgttcctgataaactcctaaaaaagaaggaccggcgagccgatccttgatttgtttggatttttatgtgaatcaggttcacatattgccctagctgagcgattaacgcagcagagacattacattctgaggcacttggttagcctgagccagaaccgcagtacccgcttgttgcagaatttgaccacggctcatgttagacacttcggtcgcgtagtcagcatcttcgatacggctacgagcagcgctcaagttgttaacggtgttgttcaggttgttaacggtagattccagacggttttggatagcacccaaagaactgcgcaggctgtcaacttgtgccagagcgctgtccaaagtttctagaggcttttctgatgctttagcagtgatgtctgcatctgctgttaatttaccctctttagtaatagtggcttcgaaatattttactttgccatctgtatcgtcagtacctttgacaacatatttaccaggattaactgaaccatcatccttaagagcttcatagacttctacacttttcaggcccttaactttagcgtcggcagtgtgatcgatatttttcttcccacctgcaccatcgtcaacctgtttaactacttctccgtgtggaacttccgcagaaatagtaaatttacccagattcagagcttctttgtcgatttttttcagatcgatgtcgataacttcgttatcattagcaccaacttgaatggtcattttgctatcttcacgcaaaacacgaacaccgttgaactgagtctgttcagaaatacgatcaatttcctttaaacgctgagtcacttcttcctggatagatttgatatcactttcagagttgctgccgttttgtgactgaacagtcagttcacgaatacgttgtaagttggtgttaatttcgttcagtgcaccttcggtagtctgtgcaatagagataccgtcattagcgttacgtgctgcctgagtcaaacctctaacatttgcagtgaaacggttagcgatcgcttgaccagccgcgtcatccttcgcgctgttgatacgcagaccagaagatagacgctcaatagcgctacccaaagtaccctgggatctattcaagttattctgagtcagcagggacaggctgttggtgttgatgacttgtgccatagttagagttcctttttaaaatcaagtcgatatataagtttgggttttacccacggtgttcatcaccgccaacagttttatcggcgctcctcaaagaacctttaatttttcttgaaaaaactttttcttttttatcacgctgcactgataagccaaacagcgtcggttcttcacgactattcctaccatagaaaaattatttttattagtaaacttttccaaaaacttaccgataaccggttcaataaagctttactaataaaggagtcaataaatggctagcatttcttcattaggcgccgggtcggggatggatctgggctctatattggataaacttcaggcagcagaacaaaaacgtttagtaccgctggcacagcaacaaaccagttataaaggtaagctaaccgcttttggtacattaaaaggcagtttagaaaaactggaaaccgcatctgaatcactgaaaaagttcgataaacttaacacaaccactgccagcgaaaaacatgatgcattcgttgccagtactgattctaaagccagcccaggtaactacagtattgaagttaaacaattggcacaggcacaatcattacagacagaaaaagtcagtaatatcaaagagtatctgggtgaatctttgggtgaaggtaaaacccggacaattaccattactcagcctggcgaaaaaaagccgatgaaaatcgagctgacagacggacaaacatcgattattgagatccgtgatgcgattaataaacaggaaggtaatgtcaacgccagtattattaaagccaaagatggcgaaaactatttagtgctgacggctaaaaaagcgggcactgaatcggtgatgaccatcaaggttgaaggtgataacaaacttagcgagttgctaaactatccaggtacaacgagtaaactcactcaaacggttgaagcgaaaaatgcgaaattgaccgtcaacaaaatcccaattgagcgtcagacaaaccatattaccgatgcacccgaaggcgttaaactggatctgaaaaaaacgaccgaggataaagataaaccaggggaacataagccagaaatactggttatatcccgtgatattgagccgatgaaagaggcgattaaaaattgggttgatgcttataatgaattacaaacgacatttgattcactgaccaaatttaagccagtaaaacagggtgaagaaccgtcgaaagataatggtgctttattaggtgacagcacattacgcggaatacagaaccagctaagaagccagattttcagctctcaggcggctaatgatattccaaccctgaataagctgggcattaaacaaaagcctgacggtaagctggaaattgataacgaaaaactggaaaaaaatctaaaagaaaagccgactaatgtgaaagcgttctttatgggtgacggtaaaaaaacgggttttgccactcagacacataagctattaaaagatgctctggatagccatgaaggtaccttagctaccgctactgatggtattaacaagcgtctaaaaacccttgatcaacaagtagacaggactaaacagaatattaacgaaacaattgaacgttataaacgccaattttcacaactggataaaatggtctcttccttgggaaacaccggtaacttcctatcacaattacagaaaataagataattaaaggaaattatgtatcaacgttcggcaagtcaattatatgcccagatagatgtggagagcgaaattatgaacgcctccccctatcagttgattcagattttgttcaacggggcgcttagcgccctacgtcgagcaattattctgatggaacaaggtaatatcgcggaaaaaggcgcagctatttccaaagcgatcaatatcatcgataatggcctcaaacaagggttagataatgaaaaaggtggagagctggcacacaatctcgcttccctttacgactatatgacccaacgtttactctacgctaatttacgcaatgatgagccagccattaccgaagtaataaagttactcaccgagatttcagatgcttggcggcaaattggccctcattacaacgccagtcaggatattgtttaatggataataaaatggatcttttgtcagcttaccaacggatcctaagtttaagtgagcaaatgcttaatttagctaaaaatgaaaaatgggatgaacttgttgatatggaaatcacctacctcaaagcagtagaagtgatcagccattcttcaatatcatcgacgacttctctttcgttacagcaaaaaatgaccaacattttgcaaataattttagataatgaaaatgagattaaaaaactactacagaaaagacttgatgaattaagtaaactcatcaaacaagcaagccaacagcaattattaaatgatagctacggccaattccctgttgaaccctatcataatacccttatgaactctacggagcaaaagtaattgagaaataaaggtgatgtactctcatcaccattatttacccgttttgtgagcttggtttaggatgtattgatttcaattcagattataaggagtcttggcaattaaatagtgttcggcttttcattctcaatatttcatacaccaatgaaaagtattttacatttctgactaaaatgatactaagcatctttaaaaccttgtaatatcccgctctactcaagcttgcccttcattttcatattccactcccatcattgatcaacgggtattaataagcttttatatgcagccctgtgatttcagttgattgtgaaaaacaaaaaggccacgccggagcgcaaccttgatgttttaatataatatgataattgaaggatatgttaatctaccaatttcaattattcatcaaagaaattcaattcaatttctagtgtcttaccgactgattcaacaaataacgcttctaattctgatgagtcatcagttttagtatacaaaagagtcaataaatattttgtttcagctacccctaaatcatattctttacctaagcattttacaattaatctttttgaaccaaattgttccttgattttactggaattatcttctacatgaataacaaaacaatttggaggagtgctagctgtatgagctacatcgaattctataatattttttaggagcaatgtattattactgatttcttcccattttcccatgctatatccaagtgaataattaagtttattagcgtaaccaaaatattcggttttcatactagaggctttaccaacagttaaccttgctttcagttgatacgcaggttcaatatgcggcttaggtttaactggtttttctcccacaaattcccaatcacaagccatcatatcttcttgcgttggctgccacggtacaaaattgccatgctcattacgcagatcaatatgcgtcaaataatcatatttagtgccaacggcgacaccatcaacaacgtaagcactgccttcttccactgttaaatcattcacacgaggggtaatagccaaatacatctttttatcgcgccaaacagaacgagcgacaagcttacgtagctttaattgaatcagggcccaagaaaaagaaccaaccggagcgacaacactatgacattcatattgcttaggatcaaactggcattcattttcaagcttaataacctcagacatattatttccttatatctataaataattaaaaattaaaccacatgatttaactttcaatttattattaaacattcagtaaatttttatgaattaatgcaaccggcataaaacttaagattcaattataacaggatataccgctcattctccttatcgttttttgatacttatcaataaattagcattaacctcagaaattagagttgaaaattattattcgaaaccgtgacaccttaaatattttattgactatgagttttacaatatttaattaaatcgctaactacaacaaacattcaaccaaaacatacggtaaagttgtaaattcagttaaccacaataaacacggctaaaaaaccagatgatatgaacgctccgagttgaaaacttcatccgctaaaaggggctgattgtaacaaaatgggcagtactgaaatgtggacagaaatgcaatctcagtatgaagctatggattgcctctcaacacaaaagaccagaaataaaaccgatggaatatcctgtttgcagcgccgcggaatttatccacgacactcgcgatctctcttattaacgatagacatcaataaattaacatacctacacctgcatattcataatctcctgataagaagccgttagcttattttttgcctgaacgcctatttgcaaagcaatactggatttctgcatctccaccattacatcattcaattcaacaccgggtacacccagtgtaaaatcctgagctcgttttgtggcattcaaacgtgtttgattaattttacccacagccgccatcagttgactggcaaatccactctgcaacggtagtggttttgcgatactggctgcctgtaatgcctgagcttgcatcagttgcagcacgctttcaattgcctgaattgacataaaaacctcgtgttaaaccaccctataacctacgccattcaatgccatattaacccaaagtaatatacggcatatttttagactgccaccctaacatagccctctcgatctaaagcgggtaattaaagtaaaaagtcagggcttattgtgccattaaaagatgagtgaacagcgaataatgacaaaactgaaaataggaagaattttttcgcttgcgtatggggagtctgttttgttacgccacgcttttagtattcatgttgaacagcaaggcaaggatcgtctatgagtgccgcaacaaccgacgttgaaaatcaaactaaaggtttcagtgctatcattaaccagataaaagctgatcctaaagtgccattattagttgccggcagcgcagccgttgcgattgtcattgcccttttcctgtggttacgcagccccgattatcgggtgctttacagtaatctgagcgataaagatggtggcgatattgtcacccaattaacccaattaaatatcccttaccgttttgccgaaaatggcgctgcgatcatgatccctgccgagcaggtgcatgagacacggctaagattggcacaacaagggttgcccaaaggtggggctgcgggattcgaactactcgataaagaaaagtttggcatcagccaatttagtgagcaggttaactaccaaagagcattggaaggtgaactgtcacgcaccattgaatctttagggccagtgcaaaatgctcgtgttcatctggcacttcccaaaccctcgctgtttgtccgtgaacagaaatcgccctcagcttccgttacggttggattactgcaaggtcgtaccttggatgaaggccagataaacgccatcgtccatatggtttccagcagtgtcgctggcttaccaccgggcaatgtcaccatcgttgatcagaccggacgtctattgacacaagccgatgcgaccggacgcgatctcaataccagtcaactgaaatacattcaggaagtggaaaatcgcttccagcatcgtatcgaaacgattctaaccccggttgtcggtcgtggtaacgttcacgcacaggtgacagcgcaggtggatttttcacgccgtgaagagacggcagaagaatataaacctaaccaacccccgaatcaggctgcggttcgctcaaaacagttgagtgaaagtgagcagagtggcggccctcaggttggcggtattcccggtgcgctttccaatcaaccgagctcaccaccgagtgcgccgattgataaaccaaacaccaaagagaacaataaaaacgacaagagcgataagaaagcatcatccgccggtaacagtaatgagcgcacggttaacagtaatcgcaataaccgccgtgatgaaaccacaaactatgaagtggaccggactattcgccatgtgcaacaacaagccggtggtgttgaacgcttatccgtcgccgttgtcgtcaattatgtcacggtagaaggcaaaaatggcccggaaactcaggccctaacccctgagcaattgacaaaaatagaagcgctgaccagagaagcgatgggcttttctaaagagcgtggcgacagcttgaatgtggttaatacaccatttactgaaagcaaagaaaatatcgaggttattcctgtctggcagaacccggttctgttagaaaaagccttcgattttggccgctacctgctattgattctggtggcatggctgctgtggcgcaaaatggtggtgcctcaacttgccaaaaaacgcgccgcagaaaaagccgccctcgacgcacagaaagttcagaaaagacaagtgactgaatcgagtgcggaaatggatgaaaaaacgcgccagaaactgacacgtcaacgagtcagtgctgaaattcaaagccaacgcattcgtgagctggcagaaaaagatcctcgcgtagtggcgctggtgatccgtcaatggatgagtaacgaacaatgagcctgaacggaacagaaaaaagcgccgtcatgttaatgaccctgggagaagatcaagcggccgaggtgtttaaacacctgaactccagggaagtccagcaactcagtatcacaatggcaggtatgcgccaaatttctaaccagcaactggtggatgtcttggcagagtttgaagaagatgccggccagtatgcggcactgagtatcaatgccagtgactatttgcgttcggtgttaattaaagcgctaggagaagaacgcgcttccagtctgcttgaggatattctcgaatcccgtgaaaccaccaccggtattgagaccctcaactttatggaacctcaaatggcagccgatatgatccgtgaagagcatccacagattatcgccaccattctggttcatttaaatcgcggacaagcagccgatatccttgcgctgtttgatgacaaattacgcaacgacatcatgctacgtatcgcgactttcgggggtgtacagccggcggcactggctgaactgacagaagtactcaataacctgttagacggccaaaatctcaaacgtagcaaaatgggtggcgttcgtactgcggctgaaattatcaacctgatgaaaagtcagcaggaagagaatgttatcgaagccatgcgtgcctacgataacgaactggcgcaaaaaatcatcgatgaaatgttcctgttcgaaaaccttatcgatgtggatgaccgcagtatccagcgtctgttgcaggaaatcaccactgactccctgctcattgcactgaaaggctgcaaccagcaactacgcgatcatttcctcaacaatatgtctcaacgtgccgcagagattatgcgcgatgacctggcaaaccgtggtccggtgcggatgtcgcaagtggagaacgaacagaaagcgattctgcttattgttcgccgtctggcagaaagcggtgagattatcctaaatggtggcgacgatagctatgtctgataagttaaaccatgctgactggcaaccctggaaaccaaacgagctcacacagtgggaaaaactacgggccaaacccgagcccgttgatgactcacaggaagagtcagagcgtaatgaaatccttgaacaagcggcaatgctggataatctgaaagaacaggcacggcagacaggccatgaacagggatttaccgagggtcaagcgcaaggttatgaacaaggttaccaagctggcttagaggctggtctggaacaggggcgaaaagaggctattcagcagcagcaacctatcaccgagcagtggcaaaatctgctggccgatttccagcattcactcgaagggcttgacacgatcattgcctcccgcttgatgcaactgtcactgaccgctgcaaaacagatcttaggtcagcctgcgatttgtgatggcactgccctgctcaatcagatccgtgaatttattcaacaggagccgatgttgagtggtaaaccccaattgcgggttcatccacgagatatgccaatggttgaacaacaattaggcaatacgctctcactacacggctggcgcttactggcagataacaaactgcatcctggtggttgcaaaatcagtgcagatgaaggcgatttagatgctagtttggccacccgctggcatgagttgtgccggctggccgcaccgggggaattgtaatgaccgcaagactcgggcgctggctggcgacactggatacttttgagcagaaactagcgaaaacctcaccagtgcgtcgttatggacgtctgaccagagcgaccgggctggtgatggaggcaacgggtttacatctgcctctgggggcaacctgcctgattgaacgacaaaatggcagcaatattgaagaagttgaaagtgaagttgtcggttttaatggcgaaaaacttctccttatgccacttgaagatctggaagggattgtacccggtgcccgggtatacgcccgcccgtacagtgaagattgtggcggtgggcgccagttaccgcttggcccggaactgttaggacgagttttggatggtgccggtcgtccactggatggttttccttcgccagataccagctatcgtgccccactcaccacgccgccaatcaatcctctgcaacgtacaccaatcagcgacgtactggatgtcggtgtgcgagcgattaatgccctactgaccgtaggccgtgggcagcgtatggggttgtttgccggttccggggtcggtaagagtgttctgcttggcatgatggcacgttacacacaggctgatgtgattgtcgttggcttgatcggtgaacgtggccgcgaagttaaagatttcattgaaaatatccttggtgccgctggtttagcccgctcagtggttgtcgccgcacccgccgatatctcaccgctgttgcgcatgcaaggtgcctcctacgccacccgtatcgctgaagattttcgtgaccgaggtaaacatgtattgctgattatggattcattgacccgttacagcatggcgcaacgtgaaattgccctggcaattggcgaacctccggcaaccaaaggctacccgccttcggttttcgccaaacttccggcgctcgtagagcgtgcaggcaatggggtgaatggcggtggctcgattaccgcgttctacaccgtactcaccgaaggtgatgatcagcaagacccgatagccgatgccgcgcgggcaattctggatggtcatatcgtcctctcccgttcgctggcagaatcagggcattacccggcgattgatattgaagcgtctatcagccgcgcaatgaccgcactcattgataaacagcactaccggcgggtacaacagttcaaacaacgactcgcaagctatcagcgtaaccgtgatctgattaatgtcggtgcttatgctgcgggcagtgatccgctactagacaaagccattgagctttatccctacatggcacaatttctacagcaagatattgaagaacgtagtgaatatgacgctgcctgcattcaattacaacagttgttacctacataacgtaacgattttctgggtgttgccattaaagcgaggaataagatgcagcaacaatcacctctcataaccttgcgtgaccttgcacaaaatgcagtggaaaaagccgctactcacctggcacaagtttgtcagaactatcagcaaatggagcaacaactcgcaacgttgatgggctatcaagatgaataccgggagcgcctgaatgacacactgagtcatggtatgccatgtaccacttggcaaaattatcagcaattcatgaaaacgctggaaaaagcgattgaacagcacaaattgcagctcaatcaatggcaacagcggcttgatacggctttatcacagtggcgggaaaaacaacagcgcctcaatgccttcgatactttgcaacaacgggcagataacaaccgaagattacatcagaacagaacggaacagaaacagatggatgaatatgcccaacgtagcgtacaacggagaaataaataatgaatctcactcttttgcctgccgacctgaaaccgacagaaaatcaaccaacgcgcagcaattcactcactgatgccgatcaaccttcggcttttgctcagtttcttaatctggaaaccgaactggcacagaaaggcggggtcaaaccaggaaaagtatcatccaaagaagaagaggttacagatgatacagaccacgatttgtcgccactattatccgtcccaaacgaattatccgccccaaacgaactgtctatcgcaaatgaattatctacctcaaataaaataccaacagagcctattacctcctcgctgattcctcttgatgtcaaagcagatacaaataaacaaccggttgctgttgatgagaaacttatgtcagcagaagagctggcggcaagtttacccatacaattatccggtttagccatcaaaccagaaaaccagaaaaccagcctccaacctgacggactcgttaagcataatgataaaaaccgtcaaattagcgttaaagaattagtcgttatagaattatcgactgaagagaatcctctgacagcgattgcaaaacaaccaaaacaggaagaagaaaaagcagacgccttttttaaaaccaaacctgaaaacggacttgggcaaaattcttcggtaaaacccaagattgctgccgcagctatccaacatgaaactgcaactccgactcatccacgtgaatcagcactcactcaaactaccgctcaagctgagatccagcccgcgccagcagccactgaaaatcaacaaaccgggcaaatctcctctgtggcaacctctcccctgctttccgccggacacaatcagacagcccagtttcagttatccagtgcctctacccccttactgaatgcccaattgggtagtgaagagtggcaacaacaattaaatcaacaaatcattttatttaaccgcaatggcctgcaacaggcagagctacgcctgcatccacaagagctaggcgcattgcaaatccgcatgtctgttgaagataatcaagcgcaattgcatctggcatcggctcacagccatgtccgggcggcactggaagcggcattacctggacttcgccatgcactggcagaaagtggtattcaactgacccaaagcagtgtcagcagtgacaacgcgagtccgtggcaacaagaacaacgtgctggttcacaacattcagacggaaccgcaagtcgcaatgctgatgccacctcagaaaatcactcagccactgaatccacagtacatttaacacctcatcaactcgcgtccgcccggggaggtgtggatattttcgcctgatagtagcaagtaacttcataacaaacgaacgagttagtcgttttttccccgtttgttccagctattgcctgcggaaatacgcgggataatgattatcgatattgatggataagtcagcccaccatggaatgcgtggacacttatccgcaacaaaaacaggaatttgtctgtccatgtctgactatagctacgagcataaacgcaaaaatccatttgggatgatactgttagtactgattgccgttatcggtaccgccatcgggggatacagttggtgggcacttaaacaggcaaaagagagtgactctgcggcatctaaagccatagcagtccctgtctttatgactctggagccttttaccgtcaacctgatcgacaatgaagatcactttgaccgagtgctttacattggtgtgactttacgtttagccgatgaaaaaactcgccagcgcttccacgaatatctgccggaagttcgtagtcgtatgttgttgctattatcacgccaaaaatcggccgatctggctcatgacagcggtaaattgcgtctgatggacgacatcaagcaaacacttcgcccaaccttggtacccggtgaaccggatcaggtcatcaccgatgtgctgtttaccacgtttattctgcgataatcaccatgagtgacaatattctttcacaggcagagattgatgctctgctcaatggcgacagtgccagtgacgacgtagaaaatacctcgtccggggaaaatgagattcgcccttatgatcccaatacccaacgccgggttattcgggaacgtctgcaagcactggaaattattaacgaacgctttgcccgtcatttcaggatggggttgtttaacatgctccgccgtagtcctgacattaccgtcggcgcaataaaaatccagccttatcatgaattcgcccgcaatctggcagtaccgaccaaccttaatctggttcatctgaaaccgttgagagggacagcactgtttgcattcgcacccagtctggtttacatcgcggtagataacctgtttggtggagatggacgtttcccgaccaaagtagagggccgagaattcacccataccgagcaacgagtgattaaccggatgttacgtatggcactggattcctatcgtgatgcctggagcgccattttcaaaattgaagtggaatacattcgctctgaaatgcaggtgaaattcaccaacattacaacatcaccgaacgatattgtggtgacaacgccatttcaagtggaaattggtgcgttgagtggtgaatttaatatctgtattccgtttgccatgatcgaaccactacgggaacgtctgaccaatccaccattggaaaatgcccggcaagaagacagcctgtggcgagagagtctggtaaaacaagttcagcattcagagctggaattggtcgctaactttgctgatatcccgctgaggctgtcaaaaatcctgcaacttcagccgggcgatatcttacctattgataaacccgaacgcctgatcgttcacgtcgatggtgtgcccgtgctcaccagccagtacggaacattaaatgggcaatatgccctgcgagtcgaacatcttattaacccagttttaaatgctctggatgaggaacagcccaatgagtgatgctaagcaacccacagataccgctgcaaccggatctgccgaagatatgtgggcagaagctctggaacaacaggccgcgcaacaacaaacctctgacagtagcgcggcaatttttgaatctctggagcctcaggatgcactggctcacttatcggatatcgacctgattttggatattccggtcaaattatccgtagaattgggccggacaaaaatgaccatcaaacagctactgagattatctcaaggttcagttgtttcccttgatggccttgccggggagccgttggatattttaatcaatggatatctgattgctcagggtgaagttgtggttgtatccgataaatacggtatccgtatcaccgatatcatcaccccttctgaacgtatgcgtcgcctgagtcgttaatatggctttccagccctcgctgcataatggcgcggcagaacctgccgcgcaaacccaaacggcgactcaagtcgccacatccgcaccacttcccgcaggtcagacactgatgcaggtcagcagtgcactggcgggggtgttgctattaattttcaccctcacttggttaatacgccgtatggggctgttttccagcaaagggaagactcagcaacaattaagtatcaaagccagttgctctctgggacaacgtgaacgtgtcgtcattgtagaagttgaagataactggctggtactgggtgtcactgctcagcaaatcaatttattacatcagatgccaatacctgaatccaaccgtgataacaccgaaggacaagctataaaaccggcgctgtttggtcagattttaaaaaatacgctgatgcgacaaggcaaggatgatgaaaaaaagtagttctctctttatgacaagggataagtttgcattgtcatgccgcctggggatgatactcgctgcgcttattttaccgatggatgccgcggcacagttgccgggcatcatcagtcaaccgctggcaaacggtggacaaagctggtcactaccggttcaaacgttagttttcattaccgcgctgacctttattcccgccgccttactcatgatgaccagttttacccgcatcattatcgtgttgggtttactgcgtaatgctttaggcaccccatcggcaccacctaatcaggttctacttggactggcgctatttatgacatttttcattatgtcaccggttttcgataaagtttatcaagatgcttatctgccttttagtgaagataaaatcagtctggaaaccgctttagaaaatggtgccaagccattacggcaatttatgttgcgtcagacaagggaaaacgatttagcgctgtttgctcgtcttgctgatcagccgccgtttgaaaccgccgattccgttcctatgcgagtactgatgccagcatttattaccagcgaactaaaaaccgcttttcagattggttttaccctgtttattccatttttgattattgacctggtggtcgccagcgtattgatggcgttggggatgatgatggtcccccctgctaccatctcactgcccttcaaactcatgctatttgttctggttgacggctggcaattactactgggttctctggcacaaagtttttacggttgacctgaaaagaggcaaacattatgactcctgaatcagtcatggcattgggaacagaagccatgaaagtcgcgctggcgctggctgcgccgttgctgttagcggctttattatgtggtttaatcgtgagcttgttgcaagcggcaacacaggttaacgaaatgacactatcatttattcccaaaattctggcggtatttgtcactaccgttatcgccggaccttggatgctaaacctatttctggactacatgcgtgaactctacagcagcatccctgtgataattggctaattatgatctcttttaacagtgaaatgctgatccagttcgtcagtgaatttttctggccgctggttcgggtgcttgcgctgttcagtactgcgccattattcagtgaaaaacaggcacctaagaaagtcaaaattggactggccgtgatggtaacactgctcttgatgccaaacctgcaacctgcgcaagtgcctattttctctgttaccgcattctgggtgatgctccagcaaatcctgattggggcatcacttggcctgacaatgcaaattgcctttgcagcagtacgttatgccggtgaagtgattggtttacaaatggggctctcattcgctaccttttttgatccctccggcggcccgaatatgcctattttggcgcgaatctttaacctcttgaccttactgttatttttggcctttgacggtcacctatggctattatcggttctggcagacacattccagattctaccgatacaaccactgcaactcagtgctcaaggatttttactgctagcacaaagcgccagtatgatatttatcaacggcatgatgctggctctgccattaataacactattattaacactgaatttatcattagggattttaaaccggatgacaccacaactttccatctttgtggtcggttttccgttaacactgactaccggtatattggtactcacgcttttaatcccgatgttagcgccatttaccgagcgtatgtttagtgaattgtttaatcgactggcggtcattatcagtggaatggttatttaaagatattatttaaaacaaagtttacctagaaaaaatccgtattttatatgatataaattgtactatttatgctataaaatcttatcgataagtaaaagaaacacaggttttaattagccatactctatggatttcaagatgcctctttgttagctgcactcactcacccccgatcacatcgttatctatgctcccggggattcgctcccttgccgtcgcgatccatcttgaaatctgtagggtatatgttacacaacaaagtcaatattggtaccagcgcccatgtttttatgcacggtacctgttatttttcatactcttaatatggcaatcagagtgtattgataaaatcgtattaattgaacaaaattatcgatgtccgcccattgatgactttttatgtaaaacagaatcccgctctggtcatttaagtgatatctttttacgctgaacacatgtttcaacagaccatttaaccaagtcaatcgtcgatcctctatccattcgaaggcatgaagcaaccgtaattgcctgagagcaagcaattacaaagcggtcccctgaacttagatttctttcaacagcgttgaatcgttcaatataatcactgaaccgagaaaagatttcgtcctgtgggttctcaatttttggcggattaacttcctttttacaaaccaagattgcatcaagattgataggatcttttgctgcacttttagggctggcaacagacatttcagcttttaccgggtgagcagctacaatgtcaaaaccagctttagtgacagaatcgtatattgccatccagccgtctattgtcgaatgatgataactgaaacacaagagaccatcttctttaagcactcggttgcattccttaaaaatactgcaaattttccttgtgaaactttcgttatccctatcttgaacttcattttcatgtgatgaatcttttctatttaagtattcatattcgccactaagagcattagaaagccaggcatagaaaaagtcactcaattcactatagtgaacaaaatcaaaatacggtggatcagtaattaccgcatcaaccgatgaattagggatgggaagtgaagaactgtccgcattcaaaatcaaagcaccttgagaagcgtttttgaacgtttcccatgattgagtaggatttacccttatcggatcactgcaaacgactttttttgaaaaacattttgccccattgttttcaatgaatacttcaaatggttcgtcaagataggtcttcgccttaatcaaacgactttcaaataatgtcgaaaatgtaccgctgcttttccccggtgttccccatatactattttctaatggtgttctctctggtttcaaaatatggttcgaaaacatatgacgaacagcaccagtaccttctcccttaaaactgcaaaacaggttattaaattcaagtgttccactgaacaggcaaacaaaatgatcccgaatcaccttgtctttaattttcaatatccgttgaagcaataatccaagacataacaattgacgttcattaaagaagtcacaccaattattgtaattatatccacgtgcttggttcgtgttatatccagctctaactttcatagtaggtaatggaagatcgcctttgatcagggaaaagcgttcacgcgtttcattaaaaaggtcgtagtcatattgggtcggtttgatatagaccttttcacctgcttcgttaagcgccataatggcatataatttatgcttgggtggacactctttgctagataccaattccttgattttgtattcattacctctactgtcaataatttttgttcccctggcaggtccattttgggggttaaagttatgtgagcagcaagggcatttaatgtcagtactattgtatttccccacaataatagattcgcatgacggacaccatatttgcgaatccggtttcttgctagcgtagacatttttactgaatacataacttgaaaacaacggaatttcttcaccctctggcgtggcgacaaccttcacccaaaaatagtaaagtgccggcgtggatttcgacgcatcgggaaccattgttgtatagtaggaaaggatttcctcttttacatcccgttcaatggatttaaattcttttttcagttcatttatattcacgctagccattgcttgtgtgactaagaatgtactaactgggttaacatcacatcctataatacttgctccaagcttcgccgcttcccccaatgtggttcccgaacccataaaaggatcaagcacaacctttccggtatatttttggtattcgtaaaaatccttccattggccttcagtaagagcaccggaaacaatagaacggaatacgcttcctaaacgcttcgcccaccatttatgaatatggtagataggacggttaatttcctttctgtaactttcgatttccgcaattggatcaatctgctcgaaaggaaaatcattttcaattatatacttcatattattttgttaacactggcatagagacagacgtacgtatttttgctatacgtgctttgcagtcagcaaaaatatcttcaatcagaacaggttcaacagattaatcaggctttccattatcaatgatattgtacaaaaaattgttttcgtaaatgtcgtaccttgatacttcttctgtagccaaatgcgatatctgaaggttttcacaatcaaattttttcgctacaaaaacttttcttgtatgaaaacacttcaatttgtagtttagtggattagggtacgtatacattgcccgatgacgaacagaaccttcaccgtacggaccgtggttatacttggtttggttcgcaactttggctttcttataaagattaaaatcatagttgatgaaatcaccgtgcatcaaaatgaaagttacaatactgctattgtcattgctcaataatgcgtacatgtaataacaaggaatctcgaccattgcattgcccatctttatcaaagcagttccgcacggcaagcaactattgtaatccatagtaagaccacgtgaatcagcgccattcggcttctgaattaactttttaacttcaagcccaacaatgatacccgttcgcttgtcacgaataataatatcaggggtagtcagcttacctgaacgaacaacttccaattcaggaaatgcttgttggagtttttgttcaatcaagcaatcaaagggatcgtcttgaactgtaccaaccaaagaaggcacacgcaggtcaacaggtataacaccattatcattaatctgaccataaaagttatcgtaaacggctttcattatttgatgttcattatggtacatgcacaatccttaagattattttctaatattggttattgttttcaaccacttccatgcaatagtaaccagaaacgctgcccgctttaggcgttataccgtaacaatttttaaaagcaagatcaaaagggaaatcaaataacacgggaaccaggaccaaacttggcaaacatggttaattatgaagcaattcgccgaacttctgcaatagcaactctttatcctgcatatgtcccggctcatagatattataccctatggatttcgagatacatcgcgacggcaaggaagcgaatccccaggagcatagcgaactatgtaatcagtgtgagagagtgcagccaacaaagaggcagcttgaaagataacgggtatatcattttaccgtccttctggcagtattctacccatttaagtactacactgtacttactttgtaacacattacgatggaatcattagctatgagcgaaactacttttacctttagggttgatgatgccctgaaaaatgactttaccgcagcagcgaaatcactcgatcgcaaaggcgcacagctactacgtgacttcatgcgcgatttcgtgcgtcagcaacaagaagcgagcgtccatgatgcttggctccgcaggcaaatagaaataggccaagcttctgccgatgccggcaatctagtgccagccgaccaagttgaagctaaatttttagcccgccgcaaagccacacttcgccgttttgaggccaagtaatgcaattattttggacgccagaagccattcaagaccgtgaggaaatatataccttatggatttcaagatgcatcgcgacggcaagggagcgaatccccgggagcatagcaaactatataaccggggtgagtgagtgcagtcaacaaagaggcaacttgaaagatgacgggtataaacaacaatcttttatttaaggggtaaacccttttaatttaattaggaataaaatcaatataaaaaaacaaatagaaactaatcttcatttctataatcacatttaaaacagagaaagaattttattaaaaaataaattccaatcatcataaaatttatatctgatttcatcataaaaaattgaactctactggacgcaaccttatttttcctcttaaaatataagactttcccttgacgacataagaataaacacttatattttgagtatccaaagcggatatgctcttttaaaatagggaaagaaatggttaaagtcatttggtctaaagctgcaatcaaacagctaacgaggatcgatactcgatatcagaagacgataaaacaaaaggtgagttcgctaacagattttcctcttgttgctctggatatcagaaaattatcaggattcgataacagatataggctcagagttggcgattatcgggttttgtttgaattactggatggagaacctaatatcctggaaattcaggaaattaggcgacgccagacaaaaacctattaacaaataggtgaattttccatttaaccatttacctctaagggctacgtaactacgtaaacatacggagcaaaagaatatggctagtattcaatttattacagacgagcatggcaaaaaacaagccgttattttgccaatggacgagtacgaaagactgttggcagctgcggatcatgatgaaaattatcaaattattccctatacaacgggaccaaatgacgatgaaactattcctcatgaagtcgtttctatcatggtagacgatgaagtttcactacaagccgcttggcgcatttatcgtggactatcacaagctgaggtagcggaaaaactgggtataaaacaagctgccgtttctcagtttgagaaatcagatcgcccacgcaaagcaacgattgaaaaattagcggatttatatgattgccgaataagtcaactagtgctcgactgattaaagttagtaaaaagttaccaatacgaccagggtgagatctcaccctgctgttttcccaccaatgaaatttctgccggtataccacccgtttcatcaaccactcaaatatcccctatcggttcaatctggttataatgaaaaacccatttcccgacttttaacactaattttgtgaatataagggtccggggttttacaatcacaaacggcacttttcatgttaatcgaaagcatgttttttccttaaccaatattaacactaccaccaccaatcacaattccgccacaactcaccgcgtcaccggttctcgccgcaggtttaccatcaacaaaaacggtactggaaccaccggcaattattcgtgaatgagatgaatgtggcgctaaactatcgccctgacgagctaaaggaataccgtcaactttcacgctggtcgatcccgaaataaccggtgtcgcgccacaatcatcatgcgctgtaccaatatcaccaatctttaccgcattacccatattgcttcctccatatctggcagaattaacataattagtctttatcttgcgtaaccgataatagctttcttttactgttcccatccagaaaaaatatcgggtcaaataacccgatattgctacccattaaattacctgaacaaaacggccattaattaatgagaaaatcggcgcagtagtactgaaataagtatcgccatcttcattattaacagtgtaataggatattggagaatattctaaaattgatttattcactaatttgaccattctacccttattcattattttaacgatatagtcatcccaattaatcggtatcattttgaaacttttttctttgatatcactgttaataggttgatcggcaaaaacactttcttcactttcatcagtggcccaagcccaggctctaagcgcaattttttgttgttccctaagagtatttatatctttggcattataagcctgccagaccgccatataagcctgttgcaattgccgacgttgctctggggtatcggtataaagggttgccttcacccattcccaatcaggtaaaccactgatttttacactgcggctaaatcggtacaaggtcatattaggaggaaattctttcggattaaaatactttttctctacatgcccatcttctacattttgagcctgtaccacatggcgtaccaccggtgtgctaatagcagcatatttagcttcattcgcgggtgttgttgccacaggctgaccgtttttatcaattgccacttcaattgccgtcaatacttcactttttttaccacgcatagccgtcagttccagcgtgcatttagcctcagggttaaagtgattgcggtctttatctgataacgcatctgaggaaaaccaacccaacgcaccaaactccaggctaacttcattttcaccatttgccaagaataacatagaggccgtactggcagtaccaaatccccgtccttcttgagccgaatcacggttatccattcccgttacgccattggttttaatatcacaaaaggcatattggatatcgaataaactgcgaatatacaacctcggttcatttgcctgagcacttaacataaaaatcactcctgataacagcaataacagtttcaatctcattttatcctcacattccgggtaatccggtgataaacgggatgttatccatcttaggcttaaagttagggtcataacccatttcccacgatgctgtttcagcacctgggactatctccggtcgattaataggccgctcttctcctatcagattaattcttaacggggattcactggcttttaacggatcggcaataacccatttccacttctttttaacttcgattatagaatttctactactatttctccttgcatcaacagctacctgaatctcagcaacaatcccattatggtagccagccagatcgatccctttatcatgttgatcaagttcaaaacccgccgctgtttttacagccacacccgctcccattgcgacttccattatcataatatgagtcttaaaggcgacattcacttttccttccagactcaatttcaaatcattcttattaccggcgtcaaaagtccactgcttttgtttataagcggcacccaactgaaaggacagattgcatgtcaaaataaggcaacattccagatctaaatagtttttatcatttgaattcctgcgggccagcgcctccctgaatttggctaccaccttctttatcttgcaatacgccgcccccatttggataagatccagttttgccgtcatccccataaaaggtgcggcactgaaacccaaaaaatgggtacggtcatccatcgaagtggttcggccataagcataagccagtccaatattgatgggatctaccttgagctcaagcagttggtagctgcgggtgccttttgaatccggatcgggcgccaggtattccttggtataacccagtagcttttccacccgattgatagcctctaaattgggcagggttttcctcacctgattaacttccgcaaacttcgccgagtaatccatatcctgaaccgttaaagcgtattcgacgttaatggccgtctgtcgggtcagataaaatgggtccgtatgggttgtccatccactgcgcagtttattgccatttttaggcttgacattttccatcgcctgacgcgcttttttctgttcatcacgccgctcctttacagaacgttctccgtgggaaaaatcaaagctcaatccaaccgaaaccataaaactgaccgacgggtaaaccgctatcgtcgcgtactgtcgactatccaggcaaccctgggttattaacttataataacgcggctcactgtacatatctgtcgggttggcaagattagataaataaaaccagacactatccaggtcactttcaatctcagcgtctttcagttgatctttataaaataatgtcacctcctgtggcgcattaaattctagcgttttctctttctgtccccccgttagcaccgcatgatgtttaaccgtgttattacatttaccttcaatctgtatcgtccctttttgaccttttccatgatcaatcaggctcatcttaattgccggcttttcaggccatacctgagtattctgaccaaaagtgacgctgattttataaatacaggggtccgggttgtcgcatgtcatgcaagcaacaccggcacgggatgaaatagtttgttcagccatatcaattaccttttaattacctaatcggggataaaacccaattcgctttttaataatgtttccatccgataataacccggccactgggggtctctaagtgcggttaaccatgccagcgggatttgctcaaactgattgatatgtctcgccatcagcaaatagagaaacccgccaatggcgcgttcatccgtgatttcattatcccgacaaaaataaaaacaatcctctgctagggttttatgttgaataaatgtggcctcatccatataggcgggagaataatgtgtatcagggaacgggtttttcaatatccggtctgaatgtgccgacagggagtcgtatggcagatctatggtaccagcgctattatagtaattgacttcattaataaatcgcgtcagtttattaatatatcgttgttcgaatagctcatttaactgagcatattgctttgttgtgatccgcaacatcttttgtctggagccagcctctacgggaaattgttttctgaccgcgtgaaaattatcttcatgcttaacgcccatcagagaagtgctaattttatttatcggccccagaaaacagtgaatttcccagtcactgaggacactgagaaactcccagatattgcgcggatcgtaaaaccggaaaaataccggtttatcttgatcgggtaataatacttgaagatatttacgtaaatgctgacgcaatgttttcatatccgcttttgagtgaagacaaattccccaacatgtttgccattcctccaaataaagtccgactttttctgtcacctccaccaagtaaggcgctaccttaagccgttcaggtggtaaagattcatcataaagacaaaccgcggggggattaaaattttccaagataaaaaacaatcggtattcaatcgcaccgtcaatgacggcataatatttttcagcggccatcagtcgttatcctccttcggacaatgtgcaacaaacaaggagccggcactggcggcagcttgcaaaatgaccggatccgccggtcgcaataaatctccgggactcccccctgagttcagattgatagatggacctttgatatcgacaccatcagcatgaataacgataaaactattacctactttcagactgattttattgccgctttgcaccgtaatatcaccattggtatcaatactgagcataccttgaactttctgtgctacattgccatcgacctgcaaagttttgtcaccctcaatctgaacaacgtagttcccggtagttttgtgttcctgttgcccatcaaccgttattttacggttattggcaatgaccagttcgtcatcatgaccaatgctggttgtacggttataattaattcgctcatcccaggaattcagtaccttaatcgccaaattcttctgagcatgaataaatatctcttcccgatctttttcatcttcaaatcttagttcattaaaaccgtcccctttatgggtttttgaacgaattgacatctgggtttttgctatcggcaaagggttaggcacaacattactggcatgataggtacgcccaataataattggctgatctggatcgccatgcagaaaatccaccagcacttcctgccccacacgcgggattgcaatcatgccccagcgcttgccagcccaagcctgactgactctgatccaacaggaactctggtcattgaatttgccatattgatcccaggcaaactgcacccgcacacgcccgtattcatcacagaagatctcttccccctccgggccaaccactgtcgcaatttgcaagccgtcaatgcgcggtttgggataaggcgagggacgccacacccggttgcgatcgccaaaggtgaagctgttcgttaaggtcgtccccatttcaccgaaacgggattcatccgcctgcggctgtctaccgtgatgactgattttaatgaccagccacagggtattaaattgctctttcggatgatcagtaagcgtaaaccctgatgccggcgccagagcaaaacagtcactttgtgcacggccaaacatagcgtcagtgcggagtgcttccagacgatattgactcaggcgctcgccacgctcatctttaaagcgcccgggaaaatcatagtaagtgtaactgggtaaatctgaacgctggtgattaatttggcgttcgtgatagtaacagtcagccccccacagcggatttttaaaagtacgatccttcaacacaatgttggcaatcccgacctgttcacgccagcagaatcgattgatgctgcattggcttcctgtagcatccaattctgggtgatagggcaatgaaaatttgttatttatccgatgagaatcaatgaaaataattatcggttcaccccgctcctcagtgaaatcgaaataataaaacatcccttcatcagccaataaacgatggagaaacgccagatcactctcatcatattgcacacaaaattcccgttcaggatgttcataacgcaattggcaatagaagtttctaacgccattttctttcaataatatgtcaataatctcagccacagattgatgctgaaaaatacgggaattaacccgtaatcccgcacgccataaagcaggttgaatggtcaaggcataataactgcgatgacgacctgtcgtactttgttcaaattgagtcacaatcccagttatactgcgctcgggttttccatcacgataaacggtcagtgtcgcaaaattatcaagaacatcagcgaaattaatatctggatcagcactggttaatgtcgcctccagacaaaataacgttgatagtgcttcatctagagtaaactccactacagcaaacgttttctccgggagatgacccgcagtcagtgtaaaaaccagtcctgaatccgccattacattcctcctgactgagtgaggtcgaagctccaggaattaaatagatcatgtaaaacaaccataatttcaccctcttttacttagagcctatcccaataggcgtaattgttgcaggccattcttatcaatgaacagtgaacacggacagcgcggaaaaaccggaacgtacacgtagtacgtgaggattttgagcactgcccaggttcgctctttatggcaaagaagggcaaataaaatagccctattgggataggccgttaaatgattaccgaaaatattcactagcaaattcattaaccaaacttttctctgttcaacatatgaacgggagggtagaagagggaagaaataatcaacttatttttttaaaataacaacattttattctaataaataggaggggttttggcagaaaatttcaatatattgaataggttacgttaaaatgaattataatgattttattaactaaaatcgctggtctgaatcagtaataaaaatattgataagaataaattcactaaaaacggagaacagaaaacaggattatttaattgagaaaatcgctggcctgagaaccagcgattaatataaataaggaaaaccgaattaacgaaatatctcaaacaacgacatgcctttcatatcagcaaatgtcttatatgatgcttgaagtacggcttgttgttgataataattcgaaatcgctgagttccattctacgtcaaccagttgacttaaccggcttttattcgccaggctgcgttccgcccccaaattatctaagtcttccatttctctcagttgtaaacccaataccgattccaccgaagagatattattcaatgcgttgcgagcgccgcggttagccttattcaacaattccagcgcatcatcacgactcttttgatctgcttcgacgaatggtgttttcaatgactgaatcgccatatctatggttttaaatatatcagattcactctggttgccatccggctcttttatcggattactggtagacgagagaaagacttgcttcccggtatgtccaataatcatagagcggttgctatccactttctgagttatttcctcagagcctcctagatagctgactgtgccggttgtactctcatcaaaaggtttcatatccgttttataaccggcaaaaatatagcggccattaccatcagtggtattacccaaattcaccagttgttctttaaaccctgtcagttgaatagccagcgagttacgatcttcgtcactcaatacaccgtttactgtggctaccaaactttcatgaatatcttgaaccacaccgacagctttggatactacactcaattgcatggaaatcgcgtttttagcaaacgagcgggccgttatatattgctggttctgagcttcagcttgagcgaccatgacaccctgagatgccgccatcggatcatcggatggatttatcacccgctgaccactggatagctgtgctccctgctgcatccatttcgactgagcagtagtgatactcgtcattttctggtcgtacaatatattggtacttacgcgcacaatttcattccttttaaatattcagcgaaatgcctaagatgtctcaggctattttttattaaatggcacgtttattagcgacggagttccaaaatggcattaaataacgttgtgacagtctggataacttgcgcattcgccagataatattgctgtaagttttgtaatgcgccatattcttcatctacgttgacgccggaaaccgactgctggtcagcgtaaagttgtttagtaatattattctgagtttctaaatcaacattcgcctcgctggtctggttaccaatggtactgaccatcgaagcataagcaccagaaaatgatgcgttaccctctaccaattttttgttctgcaattcaatgagttttttggcattgacgttatcactcgccccaccatctttattaccggcagccgccaatttcgacgcatctttaatattaaccgccatattgccaataacaccgctgacggttttcagtgtatatcgatcgttttcttttacattggttggatcaatttcaacttttagtccatcaaattccagtgtattacctgtcactttggcggcaatatccaccttaaccttaccagaagcatgctgaattttccaattagcgccatcgtagctaatatgataatcactatcttttaccaccgaggtatctgtatattccactttaaaattagcagaacctttatttttactattggcaatcacatccgggttattaaatgtgaagaaatcttcacccggtttgccttttaaatcaaaaccagcacgatgaacctgattaaattgatcgcccaataccaacgctaatcggtttaactgattacgggaattatccagtacttcactacgcgcccgtaatgtaccgcctaattgccctttatcaatgaatttttcatcaatttcaacaacatcaccaaaaccacgatcataacctaatgtaatgcgactgctatccgcattggatgaaatcgcttctactcggtaagcggttgttccctgaaccagtgtcaatccccccgcaaaagagacattgtaagaatcgccatcctgctgaatcacactcacgccaaccagcttattcagttcattgactaattgatcacgctgatccagtaatgcattcggctcagcactgccaccgcctctcatacgggtaatttcaccattgagtttagcaagttgctgcgcatagttattaatagactcagccgaattagcgattccccgattaatgttattttccattttacgcaggaaagcatccgcactttgcaactggtttaccagcccctttgatttaccaatcgctgttgttctggctgcatcatcttccgcattactgacaacattttgtaaactggtaaagaagtcatcaatggtgtttgacaggttattcgctttatctgccagcaaattatcaatctgggaaatttgctgagaataagtggtgaattcaccttgtttcgcccgagcctcagacagttgttgattaatgaattcattatattgacggttaatactggtgacagtaacaccattgccgataaagccaacggatgtcatcgtgccgccgttttgattgacaactgtcgattgccggttataaccaggaactttggaatttgcgaggttattactcacggttcccagagcaatttgagcagcttgcaggccactcatcgcgatattaataagactgctggacatcagaagatccttttacgttttatttatgtctccgctggtggcggcaaataatctttcagctagaaacaaagtctgaactgctttaatttatcggctgaactcaataaaacttgagcaaaataaagatcagaatagtttactcaaatcgtaggtataggcttttaccgcctgctctccggcaccttttagctgttgaatcactgagaccagttttttcgcatatccgggatcggtcgcataacctgcctgttgtaaggaataagccccttgctccgcggtagcagagcgggcaacgttggcgtaacggggactctctgtcagtaatttgacgtaatcctcaatcgcttccacgtaagagccataaacacggaagttatccttcattttctgtggctcaccgttgatatattctgtggtcaagatattggttaccggccctttccaacctttacccgctttaataccaaacagattatggcttggcttaccatcagcggtcagaatctctctttgcccccaaccagactctaatgcggcctgagcaataatcagcaaatgaggaataccactgcgttggctagctatccgggcaggggtcgagagcgtagagacaaaattcgtactgttcagggggagcggtttaggtgccacctcgggtttcggtaccgttcgacggataaattgctcaagcgcctgccttggcaaagtttgcaaaacgtcgttatccagcgtcatggggaccttacccgccatttcgccaggggcaattttgttgttagcaagctgcttgagcatcatatcggcaaaacctagccccttctgagcaatattctgcgcgatttgctgatcgtatatcgaagtatagagtcgtgtctgttcactgctcaacatgccctctttaggcagagctgaacgcatgcttttcaacatcatctgaacaaagagcccttccatttgttgggctacttgccgtagcccctgttgtggatcttttgccagattggattttaacgcgttaaccgactgtacatcataagccgcaccgggcagggttaaaaaatcattcatcaaatgatctccaatttcgcccgcaaacaacccgcactttccattgcctgtaagattgacattaaatcattcggtgtcgcacccagagcattcaatgcttgaataacctggctcaaacttgcactggcgttaacctgttgcaacgcaccattttgttcacggacagcaacagcgggattacgagtaacaacggtactaccacctgctaacggtgtatttggctgactaacaaccacttgattatcgacaatgacagaaagattcccttgagcaacagcgcagctatctagcatgacattgcgattcatcacgacagagccggtgcgagagttgacgatcactttggcatcaccgacatcaacacggacagtgagattctgcacatgggagaggaatttaacctgcgcacttttatctctcggcatacgcaattgtactgtgcgggcatccaacggcgttgctgttcccgttccatccgtacgattgatcgtatcgctaatttgctgcgccagtgagaagtcttcgttatttaattgaagattcagtacgccattttcaccaaactgggtaggcaattcgcgttcaatcactgcaccgttactaatccgaccacctgcaagttgattgacttttacactgcttccccccgcgctggcaccggcaccaccaaccaatatattaccctgcgccagagcatagacctgattatcaacaccttttagtggtgtcatcaacaaagtaccaccacgtaagcttttcgcgttccccaatgaggaaaccaccacatcaatattctgcccggcacggccaaacggcggtaacttcgcggtgaccatcacggcagccacgtttttcaactgcatattggttcccggaggaacagtaatccccaattgggataacatgttgcttaaactttgggtggtaaatggcgtctgagtcgtctggtcacccgttccatccagcccaactactaatccataaccaatcaacgcattttcccgtactccttgaaccgtggtgagatcacggatacgttctgctgatgccgtcgttgtcaccagagtcagcaatacaagaagaaggctgacagcaaattgttttatcataaccatcccctgttaaaatggtgcaacattcaggaagaaacgctgtaaccaccccatgttctgcgcttcattgatatagccattccccacatattcaatgcgagcatcagcgacctgattggaactgaccgtgttattagcattaattgtccgtgggttaacgacaccggaaaaacgaataaactcggttccctgattgatagctatctgcttttcaccaaccacatgcaagttaccgtttgccagtaaccgatcgactgtcacggtaatcgtccctttgaaggtgttattcgcattagcgccgcctttcccaccaaacgtgttctcggcttccatgtccagatcggttttatctccaccaattagccctttcaggaaacggggagtcagtgctgcggaaaacgtgtttttcccattacggctggcattagccgaagagttcttactggcgctgacattttcctgcaatgtaatcgtcagggtatcgccaatatttcgtggtcggcgatcttcaaatagcggctgataaccataataaaccggctgtactacttgaaaaatagcaccattagggactggtgcagttgccacagaaggtgcggcggtggttgctccctcaaccaggggtttttgcggtatatacgcacagcccgttagtgacaataccgccagtgctatactacaacgccatttattcgccatatttttccgtaaatggcggaactgacaaacggcgctggtctcggcaacagccattgtatccatcttcgatactcttaatttatccctgaataacggggaaactgaatgttcccccgcggttctgattgacgattaggttataactgagtcagtttttgtagcatctgatcagacgtcgacaccgctttactattaacttcataagcacgctgagtctgaatcatattgaccaattcttccgcgatattgacgttagatgtttcgacatatttatgctggagcaatcctgcgccattgattcccggtgtattttcaatcggtacgccagagctgctagtctctacataaaggttttcaccgatactttctaacccactgtcattgataaaagttgtcagagtaaattgaccaacttgctgaggtaccgattgcccctgtactttcacactgacaataccatcactgctaatggtgaggtccgtcgcattatcaggaatggtaatagtagggaagatcaaaaaaccgttagcggttgtcaactgtccgttttgatcttcctgaaatgaaccgtcacgggtataagcactggtaccatcaggtaactgaacctgaaagaaaccctttcctctaatggcaacattatggctgttattagtttcagataagtttccctgactatgtatacgttctgttgctaccgggcgtaccccagtacctatctgtaaaccagaaggtaagcgagtttgctccgatgacatcgcccctggttgacgaatgttctggtaaagcagatcttcaaaaatggcacgctggcgtttaaaaccattggtgctgacgtttgccaagttgttggcaatcacatccatattggtttgctgggcatccagcccagttttagcaatccataatgatcggatcatcggttttatcctctgtgtctaaatcaactcattgctaatagctgattagcacgttgtgcattttcatctgagctatggatgactttcatctgcatttcaaaacggcgggcattggcaatcatgctcaccatgctttccattgggttgacgttacttccttcaagcacaccgggcattaatttcacctcatcactggctggcaagacatcaccctgtaacccttgcgcctgttccgtcatgtgaaaaaggccatcatcgccgcggactagctgatcgctctccggtttcaccattttcaatctgccaagttgccccaactgtgttggcggatcaccaggaatcagtgcagatatagaaccatccgtcgccagggttaactcagcctgtggcggaatattgatcgggccgttgtcccccatcaacaagttaccttgaacagttaactggccttccgctgaaatctgaatgctgccgttacgcgtgtaagcctcagacccatcttcaagctgaaccgccagatatcccccctgcccaatcgccacatccaacggacgagaggtatagttcatcggcccctgacgattgtcagaacccggcgttgaagccacaaccaaagtacgggtattaaaggcagccccttcaacaggcaccgctcgcaaagcagccagttgcgccttaaaacccggcgtcgaggcattagccaggttatttgccgtcactgcctgatgttctagtgtctgacgagcaccgcccattgcggtataaatgacatgatccataatgctatcctgaaactatcagcgcatgctgaccagcgtttgtaggatctgatcttgggttttaatggtttgcgcactggattggtagttgcgctgcgccacgatcatattaaccagctcctggctcatatcgacgttggatgcttccagcgaaccactgagcaatttgccaaaaccgccagaatccgcaatgccaaccactgggttacctgaagcgctcgtctctacccaaacgttatcacccttcgctgccagtccttctgggttagcaaagttagtcagaacgatctgacctaataattgggattgctcattggtataggtgccgatgacacggccatcttgctcaatacggtagcccttgaattcacctgcggcataaccgtcttgcttgggtgctgatatgctgtcagtatcaatcttttgctgtttactgccattaaaatcaatagtgatatcagcggcattagaaccattcagagaaggaacattaaatgtaaactgattattgtcaccaattagtttaccgttgccatcaaatttcaacgtccccaacgaagcggctttagcgccctcaaccgcactatcctgagcatgaacctgccattcgttatcattcgttttcacaaagaaaacctggatagcatgtgggttacccaagctatcaaaggtggtaacactggtaggatagttataagaatcgttattttccggcgagaaagcctctgtcggttttttatgcatcgaattaaggttggctgtcatcgtaaccttagttgttgctttagccatcaatataccttgaggtattgtaattggctctgggttagcccctttctgaatctccggcgcgccaccattgacgctggcagcgggatagccggtcaatttcatgccttgcatgttgataatattgcggttctcatccatcttgaattggccgttacgggaataataaatcccgccatcaccgccttgcatacggaaaaaaccgccctgcgtgatcgccagatcaagtgttcggttagtcgtcgttggcgtaccatctttaaaattctgattaacacccgatacttttacccccagtcccacctgagaaccggcaaaaatgtcagaaaaagcaaccgtgctggatttaaaaccatatgtcgccgcgttagcgatattattaccaataacatccaaattacctgccgcggcattcaaaccacttactgcttgtgaaaaagccatattattctccgttaaaattcttgctggttaaagaatttgacgtatctgatccatagtgacggcaccgatccgccctaaatctagcttagcgccgtccgcgtcacgagtaacaccatttaccttcgcaaacctcagcggctgaaatactctctgttcgcctttatagctggcagtaatagtgaagttataagcgccatcctcaacattcgtgccatcttcttttttgccatcccaagggcggaagctatggacacccgcttccaatccaccgagatcaatttggcgtacaaccccgccttgtttatcaataatggtgacttgcacactatccgcgggcctttccaactcaataccatatggtgtcgtactgacgttcccagcttctttgtctaaacctgccaaaatagtattcccagggatcataacgcctcgcccaatcagagctgatgcctgtacaggctgattattatttatctgaccgacaatagaccccagtgtggtattcagcttttcgatccccgctagtgtgttaatctgcgccaaatgggaagtcagctcattgttcttcatcgggttagtggggtcttgatttttcatttgcgcgaccagcaatttcatgaagttgctattgagctcttcactaccctttttcttgccagccaatactggctctccaacaatcgtgttattcagtgattcattcactgaaccggtaatcgccatgagtcactcctgttactgacctaacgtcaatgttttcaacatcatcgacttagttgtattaagcacttcaacgttggcttgataactacgggaagcggaaatggtgttaatcatttctccgaccacatcaacgtttggcatccgcacataacccttttcatcagccaatggatgtcccggctgatactcaaggcggaaaggggtgggatcatcaacaatttcactgactctgacgccaccggtttcctgccctgccggtgcggcaacacggaaaaccacctgtttagcccgatacggctgaccatcaggtcccgcaacactatcggcatttgccatattgctggcgctgacatttaatcgttgggattgagctgataatgccgagccggcaatatcaaaaatactgagtaaagacattgcccttatccttgctgtaagactgccatcatgcttttaacttgagagctggtcgccgtcagttcagcctgatatttcaagctgttatccataaaattgctgcgttccatatccatatccaccgtgttgccatccattgctggctgataaggcacccgatacagtaagtccatctccattctcttctgaggctgaataggaatatgccgatcggatgtcagcgtcagcccgatcccgtttccggtgacccgaccgtgtgcaatggtttttttcagttgtgtggcgaaatcaatatcccgcgcttgataaccgggcgtatccgcattggcgatattagcggacaatatttcttgtcgccgtgatcgcaatgacagagcttcctgctgaaaatgaaaggctgcatctaatttatcgagcatattcctccctctgatgtgactgacctgtgttgtgaaacttaatagcgctgttcgcgatcgcgaaattcgcagtaaacagaataaacgcagaaggaaaagcctatcggatgaatagacgctaattgaattgctatttatcccattggccgatattcaatgtaggtacacttatacgcgactaattacgcgactaatatatgcgactaaacggcagcatattgacctacagaaataatgagagcgagaagatgcaagctataaatattatcgggctgttcgcatttttctttatcacttcgatggcatggggcaataatttaccccaagctatggagcactatttccagcagatacatagggataatcattacaaagtttctgttaacatcagaacccctgaacaacaatggcctcagtgtgaacggccagaaattcaacccgctatcggtggtcaaaattggggaaatctctctttacctgttatctgccatcaacaacgcaaattcattcaagtcgctgtcagtgtgacagggaattatctggttacccgccgagctatctcgcgtaatgatgttttatcagataaagattttcaggtcagaagaggattactggaaagactaccgcatgatctggtcattaacaaaaatgagataaaaaatagtattgcgatacgtaacatcccggcggggcaggcgattacgcataatatgttacgccgcccgtgggttgtacggtcaggccagagtgtggcggtgattatacagggaaatggctttcagatacgaaacgaagggaaagctattaataacgccgctatttctgataaagtcagagttcgaataaattcagggcatgttataaccggccaggcattagaaaacggcaatgtaaaaatcatgttataagttctaaagttttctttcactgtgccgatataaccagcagagcacgatttgcaggtatgcaaatggcatgtaacctgctccgatccataggtgaacctatgcctggccataaaggataatgattatgagtatcgaacgcactcaccccttattagctatcgctgctgttcaacagcgaccaactaatgaaagcgcccagggcacccgaaaaaccgccggcgttaccttacaaagcagcgatgcacaagtaaaactgagcgaagcacaaacaaaactggttcaaccaagcagccaggatatcaatatccaaaaggtgcaaaagttgaaagaagctattgctcagggaagcttaaaaatgaacagcggtaaaatagcagacgctctgctcaaagaagccgccgaaaactttcaatacgataagaaataattaaacccgctatggaagaacttcaacaattactcgaacagcaagtgacctatttgacctcgctgacccaaactgtggcggaagaacagcgtattttgtgcgagggttttattgaagcacgagatttgcaccagataacagaacgaaaaattttcctgttgtccgcgcttagccattcagaacagcaacgtcttaatttgagcaaagcattaaacattactgcgccttatgataaacaacctttgctggccacattatggcaacagatcggcaaagcagttatccgggttcgtgatttaaacactcataacggttcgttgttaacccagcatcttgatttgaatagtaaagccattgctttcctaaaaagccatcatagcccctcgctttacggttcagacggccaggctgcccgtcacagcatgctttccggccacaaagttcaggtttgattcagtgcattaccgcccattgcggtagtgctactttttattgttttgatagtatctgtaagcccaccttcctgttcaacccgagcttcgtcgctgctcacggagtcctcaagcatgaataattcaaacgaaacgaaatgtactgtgaaacagttgttgcaatcggggaagaacggattagcaaaaatcaccatttgtaagtcaacataacaattgcacaactataatgttttgcgtgttacgaaaatatattgcaaaataggaataagcaacaatgggtaactatcaaaattaacagcgagaacattcttcatttcattaatctaccttgggaataatacattgatgcataagcaactaaaaaaaagaaaatcgagcggacaacaggtaccaaaaacgcctcagcaacaattcaaaacttactggaagtccatcgaaaaataccaattgaagatcgccaagctacaacagcaacaagacgaattgttcatgcgctttcaacaggagatcttaccggtagaacatcaatatatgcagtccagatatgataaagcggcacggttgctttcatttgccgataaaaaatcgctggggaaaaaccaacggagagaattattttcctggatagaagaagagcttgctgagttatatacttacccctttaacgaaaaccttgatctcaataagttgaccgatcacttttccaatcttaatgcgttgaaagaagaggaaattccgacaccagaacagatggatgatatccgacagacttttagtgaatattttgattttagtgaagaaatatctgatgaagaattacttgatatgataaaaaatcccgaaaaaatgcgttccaccatagaacagcgttttcaacgggaatcagagcatttccacgatgaatatgatgcagaagagacctctgacttcgatcctgcggcagaagaccagaaaaaactggattctttgtttaaatcgcaggaagtgagccaaatgtatagaaaaatagccaaggtactgcatccggatcgtgaacaagatttggatgagaagaagaagaaaaaccagttgatggtacagttatcaaaagccaagaaagataatgatgtctggacgataatagacatgtaccacaagtacattgatccaactttcagttttaatagccgggatatatccaacatcaataaattgctcaaagcacgtatagacatattagccaatgagcttaatcagctaaaaaaatctgattcgttaccgggcatgatttggcgcacactgggaggtaatacatcgaagacaatagagaataacctccgcgaacattgcaaaaaattgcggcaaaatatagaaaacgaaatccaactgcgcgaaaacctacgctcactcaccgtactaaaaagctaccttgcagaacgacgtgatacctttgaatttgaacaagaaatgattgactattttttcaaacaatattgaatccgctgagtctgatggaaattccagtggcttaccggccattaactgcgcactgtgtcagtacattaccatccattgtggtagtcccatttccttgtaatatatacaaaaaatggggctgtcctagattagaccatcatttgacattttcaaaaacataaactgcaccggcttcggactcagaaccaagcttgattggacctgcgccaacaaccaaactcgtccccgccttattcaggccgacagacccaccaaaaccacttaaattgtctgaagggttcaaaatctccataggtgtttccatattccacttattatttaagcaggtatacacatataccctggaatacgcccccactaccaagcaatctcctgcatcattcagttcgagaacgcggccaaaatacgttacgtcacttgcaggagccgaaaacttaatgggattttctttatcccagatcccattcgtgcgcttatacaaataaacccacccatctgtggatttataaaattccatacccaccgctaggcgatctccctctgcattcaggctaaaagccctgcccattaataggttattttcagaggcactaaacttaatggggttttctccatcccagatcccattcatgcgtgtatacacataaatcgtgtaaccgttatcacgcaccgccaaacaatttcccgtagcacttaagtgggcaatccaaccaaactcataagaatccgaaggggccggaaacagaatgggtttttttgtatcccagatcccattcatgcgtgtaaacatacggaacggagagtagtctttgcccccagccaccagacagtctcctgcggcgttcaagctgacatttacaccaaagtattcaactccaatcggaaacactacggggtgttttgtatcccagacgcccttcgtgcacgtatacacacaaacccgcccttggttataagtgggatacggcaacatgtttcccaacgccaaggtatctcccgccgcatccagacagacatcccatgaagatctatgatattcatcttcaaaagcctcaaacacaattggcttacgtatattccactcaccactcttccggcgcgtatacacacagacttgattattcatcccaaccgctaagcagtctcccgctgcgttcagactaacagagctaccaaaatactcattctctttggggaagggagaaacaattcgcgttatcatggtacgtttcaaacccaacacctgcgtaatctccatccgctcccgccgcgacaaactgaaaaaatccgcaaactgaacctgccgatcggcatccaatttcaaataccctcccccatcaaaagagagcccaccttctggcttcagtgataaggccaaagcgccttgattagaattcaacccgccagaatgctgggtgttgagggtcagttttcctttgccatctcgtttcagtcctgtggttaggttatcaccctgagcgccatcaataatttcatatgccttatatgcctcatcaatcaaatgggaaaaggcttcaggcatgagccgtacaccagacttaaaactcgctttcaatgagtcaacagaactaatttctttatcagtcatcatatgtcctcaaaagccgtattaggccgtcactgccatcggtttctgttaatgttttatccacttcgttaaagtcgatggaattaagtgacggcactgactacgaaatacaccacaattaatgccttcacaccttttagctcgatatcctgcggtttggcgatacttaacttcactgactacctcaggtatgttgctatcttctaaaaacacatccccgataacactgatttgatatttaagttgaatatgtcattaacttttcgtataacacaatctgatattattaagcattatggaaatgtaaatttttgccagttatttaataaaaaattaattgttcctataaaatttcacataaaaatataccgcttaaataataactcaagaaatataattaccgcaacaaccataaagttaattagattaaaatcaatccaccaaaaaacaaaaaaattaaaaaattaaaaaattaaaaaattaaaaaattaaaaaattaaaaaataacataataaaacatctttatttaaatataatctttttactatcattcaataaatgtatttcattttaatttttaaagaaaaattagcacatattcaaacaatatcaaaatcataattacccatgttaaataattcacaatcgtaaataaaatcaatataaagacaagaataatggttaataaataaatttaaaactcctcataaacacaattaccacaaaattaaaaataatataaaatcacctaaaatgataacaccacatccttttacaatatgttcctgttatgtttaattgatttttattagatattatcatgcacttactttccatgtttgaaggtaaaaaaacaaaataattgttagatacccatattctgttctatgccgccaataactctacaaaaactaaataagagaacagttgaattaattaatcatgatgctaacacacttttttaacgaaaaacgccgtaaaccttcatctaatgcggacgggaatataaggcggaaagtccaaggactttaaaaagcaatccgacatcacctaattaacatccagtttaatgattatagtcatcatttgacattctcaaaaacataaactacaccggctttggatttagaatcaacactctctgacgttgcaccaacaaccaaactcgtccctgccttattcaggccaacagacccaccaaaaccatttaaattgcctgaaggattcaaaatctccatcggtgtttccatattccacttatcattcagacaggtatacacatataccctggaatacgcccccactaccaagcgatctcccgcatcattcagttcgagagagctaccaaaatatacgctatttgccggggccgaaaacttaatgggattttctgtatcccagaccccattccggcgcttatacaaataaacctccccatctgtggagttataaaactctatccccaccgctaagcgatctccttctgcattcaggctaaaagccctacccacgaataggttattttcagggaccttgaacttaatggggttttctccatcccagatcccatttgtgcgtgtatacacataaatcacgggagcataatcacgcaccgccagacagtttcccgcagcacttagatgggcaatccagccaaactcataagaatccgaagggatcggaatcggaatgggtttttttgtatcccagatcccattccggcgcataaatatacggaacggagggtagggtttgcccccacccaccagacagtctcccgcagcgctcaagctgacattcacaccaaagtattcaggtcctatcggaaacacaacgggatgttttgtatcccaaaagcccttcgtacgcgtatacacacaaacccgcccttggttataagtgggatacggcgacatgtttcccaacgccagggtatcgccagccgcatccagactgacatcccatgaagatttataatattcatcttcataagcctcaaacacaataggtttgcttatattccactcaccactcttccggcgcgtatacacacagacttgattatttatcccaactgctaaacagtctcccgctgcgttcaggctaacagaagcgccaaaacgctcatcttctttagggaaggtagaaacaatgcgcgttatcatggtgcgtttcaaacccaacacctgcgtgatctccatccgctcacaccgcgataagctgaaaaaatccgcaagctgaacctgccgatcggcatccaatttcagatatcctcccccatcaaacgagagtcccccttctggtttcagtgataacgccaaagcacattgattaaaatttaacccgccagaatgctgggtgttgagggtcagttttcctttgtcatctcgtttcagtcctgcggttgggccatcaccctgaacgccatcaatgatttcatatgctttataggcttcatcaatcaaatgggaaaaggcttccggcatgagccgcacaccagacttaaaactcgctttcaatgagtcaacggtattaatttctttatcagtcatcacatttcctcaaaagccagccgtattagacagtcaccgtcatctgttttctgtatgggcatcaattgatattctcaaagatataaactgcaccagctttggatttagaatcaacaccttctgatgctgcgccaacagccaaactcgtccccgccttattcaggccgacaggcccaccaaaaccatttaaattgtctgaattgcctgaagggttcaaaatctccatcggtgtttccatattccacttaccattcagacaggtatacacatacacccgggaagctgcacccactgccagacgatctcccgcgtcattcagttcgagagaaccgccaaaagatatgcgacttacaggggccgaaaacttaacgggattttctctatcccagatcccattcgtgcacgtatacagataaacctccccattatagggtttataaaaatccgtacccaccgccaagcgatctccctctgcattcaggctaaaaaccccgctaaaactagatgatccaccttcagggcgacggaacttaatggggttttctatatcccaaatcccatttgtgcgtgtatacacataaatcgcggaaatgtaatcatcacacaccgccagacggtttcccgcagcactcaggtgggcaatcgcgccaaactcataagcatccgaaggggccggaaacagaatggggttttttgtatcccagatcccattcctgcgtataaacatacggaatggagaggagtatttgcccccagccaccagacagtctcctgcggcgttcaagctgacattcgcaccaaatcttacagcatccctcggaaacacaacgggatgttttgtatcccaaacgcccttcgtgcgtgtatatacacgaaccacttcgggccatatgtctcccaacgccagacaatctcccgccgcatccagaccgacacgccatgaagataaatcatattcaacatcctcaaacataatcggcttgcttatattccactcaccactcttccggcgcgtatacacatagacgtgactattcatcccaaccgctaaacagtctcctgccgcgttcaggctaacagagctaccaaaatactcatccgttctagggaagggagaaacaatgcgcgttatcatagtacgtttcaaacccaacaactgcgtgatctccatccgcgctccccgcgataaactgaaaaaatccgcaaactgaatctgccgagcggcatccaatttcagatatcctcccccatcaaaagagagtccaccttctggcttcaaggatagcgccaaagcgccttgttcgaggtttaacccgccagaatgatgagtgttgagggccagttttccttttccatctcgtttcagccctgcggttgggccatcaccctgagcgccatcaatgatttcatatgctttataggcttcatcaatcaaatgggaaaaggcttccggcataagccgcacaccagatttaaaattcgctttcattgagtcaacgatattgatttctttatcagtcatcatattttcctcaaaagccgtattagacagtcactgtcttctgtatggacatcatttgacattctcaaagatataaactgcactggcttcagacgcagagccaatcttcattgaaattacaccaaccgccaaactcgtccccgccttattcaggccgacagccccgccaaaactatctaaattgtctgaattgcctgaagggtccaaaatctcgataggtgtttctatattccacttattattcagacaggtatacacatacacccgggaagcggcacccactgccagacgatctcccgcatcattcagttcgatagcgcggccaaaatacgttacgtcacttgaaggggccgaaaacttaataggattttctctatcccaaatcccatttgtgcgtgtatacagataaacctccctaacaatattcgtggacttataaaaacccacccccacagccagacgatctccctctgcattcaggctaaaaaccttgctgaaaacagatgattgaccttcaaggtgactgaacttaatggggttttcgctatcccagatcccattcgtgcgtgtatacacataaatcgtgcttattgtgaaatcatcgtaaccatgcaccgccagacagtttcctgcggcactcaggcggacagccttgccaaattcataagaactcgaagggaccggaaacttaatgggattttcgctatcccagatcccgttcgtgcgtgtaaacatatggaacgtagaatgtaacgcagatttgaattcgcacccagtcaccagacaatctcccgctgcgctcaagctgacacccaggccaaagaattcaatgcggctcggagccggaaaccaaacgggctttcttacattccagacgccatttgcacgcatatgtacaccaaccctctgtctgaacctatttgccaacgctaggcaatctcccgccgcattcagactgacatcccatgaagaatcactttgataagactcaagcacaataggcgtgcttgtattccactcaccactcttccggcgcgtatatatacagattttagtattcatcccaaccgctaaacggtctcccaccgcattcaagctaacagaatagccaaaaaattcacgcgcctcgggagagagagtggtagaaacaatacgcgtcatcatggtgcgtttcaaacccaatacccgcgtgatctctatccgttcccgccgcgataaactgaaaaaatccgcaaactgaacctgccgatcagcatccaatttcagataccctcctccagcaaaagagagtccaccttctggtttcagtgatagggccaaagcgccttgatgagggttcaacccgccagaatgatgaatgttgagggccagttttcctttaccatctcgtttcagccctgcggtcgggccatcaccctgagcgccatcaatggtttcatatgccctatatgcctcatcaatcaagtgagaaaatgcttccggcatgagccgaacaccagacttaaaactcgctttcaatgagtcaacagaactaatttctttatcagtcatcatatttcctcaaaagccgtattagacagtcaccgtcatctgccttctgtcttctataacagccatcaattgacatcctcaaaaacataaactgcaccggctcggggttgagaatcgacactttctgaatctgcaccaacggccaaactcgtccccgccttatttaggcagacagccttaccaaaaccatttaaattgtctgaattgcctgaagggtccaaaatctccgtaggtgtttctatattccacttattatttagacaggcatacacatacaccctggcagccgcacccactgccagacgatcccccgcagcattcagttcgagagagcgtccaaaatctatgcgacttacaggggccgaaaacttaacgggattttctctatcccagatcccattcgtgcacgtatacagataaacctccccattatagggtttataaaaatccgtacccaccgccaagcgatctccctctgcattcaggctaaaaaccccgctaaaactagatgatccaccttcagggcgacggaacttaatggggttttctatatcccaaatcccatttgtgcgtgtatacacataaatcgcggaaatgtaatcatcacacaccgccagacggtttcccacagcactcaggtgggcaatcgcaccaaactcataagcatccgaaggggccggaaacagaatggggttttttgtatcccagatcccattcctgcgtataaacatacggaatggagaggagtatttgcccccagccaccagacagtctcctgcggcgttcaagctgacattcgcaccaaatcttacagcatccctcggaaacacaacgggatgttttgtatcccaaacgcccttcgtgcgtgtatatacacgaaccacttcgggccatatgtctcccaacgccagacaatctcccgccgcatccagaccgacacgccatgaagataaatcatattcaacatcctcaaacataatcggcttgcttatattccactcaccactcttccggcgcgtatacacatagacgtgactattcatcccaaccgctaaacagtctcctgccgcgttcaggctaacagagctaccaaaatactcatccgttctagggaagggagaaacaatgcgcgttatcatagtacgtttcaaacccaacaactgcgtgatctccatccgcgctccccgcgataaactgaaaaaatccgcaaactgaatctgccgagcggcatccaatttcagatatcctcccccatcaaaagagagtccaccttctggcttcaaggatagcgccaaagcgccttgttcgaggtttaacccgccagaatgatgagtgttgagggccagttttccttttccatctcgtttcagccctgcggttgggccatcaccctgagcgccatcaatgatttcatatgccttatatgcctcatcaatcaaataggaaaaggcttccggcatgagccgaacaccagacttaaaactcgctttcaatgagtcaacaaaactaatttctttatcagtcatcatattttcctcaaaagccgtattagacagtcactgtcttctgtatggacatcatttgacattctcaaagatataaactgcactggcttcagacgcagagccaatcttcattgaaattacaccaaccgccaaactcgtccccgccttattcaggccgacagccccgccaaaactatctaaattgtctgaattgcctgaagggtccaaaatctcgataggtgtttctatattccacttattattcagacaggtatacacatacacccgggaagcggcacccactgccagacgatctcccgcatcattcagttcgatagcgcggccaaaatacgttacgtcacttgaaggggccgaaaacttaataggattttctctatcccaaatcccatttgtgcgtgtatacagataaacctccctaacaatattcgtggacttataaaaacccacccccacagccagacgatctccctctgcattcaggctaaaaaccttgctgaaaacagatgattgaccttcaaggtgactgaacttaatggggttttcgctatcccagatcccattcgtgcgtgtatacacataaatcgtgcttattgtgaaatcatcgtaaccatgcaccgccagacagtttcctgcggcactcaggcggacagccttgccaaattcataagaactcgaagggaccggaaacttaatgggattttcgctatcccagatcccgttcgtgcgtgtaaacatatggaacgtagaatgtaacgcagatttgaattcgcacccagtcaccagacaatctcccgctgcgctcaagctgacacccaggccaaagaattcaatgcggctcggagccggaaaccaaacgggctttcttacattccagacgccatttgcacgcatatgtacaccaaccctctgtctgaacctatttgccaacgctaggcaatctcccgccgcattcagactgacatcccatgaagaatcactttgataagactcaagcacaataggcgtgcttgtattccactcaccactcttccggcgcgtatatatacagattttagtattcatcccaaccgctaaacggtctcccaccgcattcaagctaacagaatagccaaaaaattcacgcgcctcgggagagagagtggtagaaacaatacgcgtcatcatggtgcgtttcaaacccaatacccgcgtgatctctatccgttcccgccgcgataaactgaaaaaatccgcaaactgaacctgccgatcagcatccaatttcagataccctcctccagcaaaagagagtccaccttctggtttcagtgatagggccaaagcgccttgatgagggttcaacccgccagaatgatgaatgttgagggccagttttcctttaccatctcgtttcagccctgcggtcgggccatcaccctgagcgccatcaatggtttcatatgccctatatgcctcatcaatcaagtgagaaaatgcttccggcatgagccgaacaccagacttaaaactcgctttcaatgagtcaacagaactaatttctttatcagtcatcatatttcctcaaaagccgtattagacagtcaccgtcatctgccttctgtcttctataacagccatcaattgacatcctcaaaaacataaactgcaccggctcggggttgagaatcgacactttctgaatctgcaccaacggccaaactcgtccccgccttatttaggcagacagccttaccaaaaccatttaaattgtctgaattgcctgaagggtccaaaatctccgtaggtgtttctatattccacttattatttagacaggtatacacatacaccctggcagccgcacccactgccagacgatcccccgcagcattcagttcgagagagcgtccaaaatctattacgtcacttgcaggaaccgaaaacttaataggattttcgctatcccaaatcccattcgtgcgtgtatacagataaacttttccattaataatggggaaataatcacgcacctcccccaccgccagacgatctccctctgcattcaggctaaaaaccttgccaaaaagggatgagctgccttcagggagcttgagcttaatagggttttcgctatcccagatcccattcgtgcgtgtatacacataaatcgtgcctcttatgtaaccagaagaaggatcctctccaaacactgccagacagtttcccgcagcactaaggtgggcagcccagccaaattcataagaacccgaagggatcggaaatttaatgggattttctctatcccagatcccgttcgtgcgtgtaaacatatggaacgtagaggagtatatgcccccagccaccagacagtctcctgctgcgctcaagctgacattaataccaaagtattctctggcacccagagccgggaaccaaacgggatttcttgcatcccagacgccattcgtgcgtgtatatacaccaaccatcatgctagcatcagcgggtcctctatttcccaacgccaggcaatttcccgccgcatccaaactaacatcccatgaagatcccaaataatcattttgaaaaggctcaagcacagtaggcgtgcttgtattccactcaccactcttccggcgcgtatatacatagactttattaatcatcccaaccgctaagcagtcccccgccgcattcatgctaacataatcgcccaaggatccatttctcttagggaagggagaaacaatgcgcgttatcatagtacgtttcaaacccaacacctgcgtgatctccatccgctcccgccgcgataaactgaaaaaatccgcaaactgaacctgccgatcggcatccaatttcagataccctcccccatcaaaagagagtccaccttctagcttcaaggatagcgccaaagccccttgttcaaggtttaacccaccagaatggtgagtgttgagggccagttttcctttgccatctcgtttcagtcctgcggttggactatcacacggagcgccatcaatggtttcatatgccttatatgcttcatcaatcaaatgagaaaaggcgtcagacataagccgaataccagacttaaaactcgctttcaatgagtcaacagtactcatttctttatcagtcatcatatttcctcaaaagccgtagttagacagtcaccgtcatctgttctctgtcttctgtcctctatttgaccttctcaaaggtatagactgcaccggcttcaggagcagaaccgaccttggctaaaaccgcaccaaccgccaaactcgttcctaacttattcaaactgacagccttaccaaaaccatttaaattgtctaaattgcctgaagggtccaaaatctcggtaggtgtttccatattccacttaccattcagataggtatacacatacaccctagaagccgcccccactgccagacggtctcccgcatcattcagtttgatagcgcagccaaaatacgttacgccacttgcaggcaccgaaaacttaatgggattttgtgtatcccagatcccattcgtgcgcgtatacagataaaccttcccattaataataggtgaatcatcatccgcccccaccgccagacgatctccctctgcattcaggctaaaaaccttgccaaaaccgggtgagctatcttcagggggattgaacctaatgtagctttcatcccaggtcccattcgtacgtgtacacacataaaccatgtttattgtagtacgatcagaataataggaaccatgcaccgccagacaatttcccgaggcactcagacaaatcgtggccccaacattcgaaaaacgaagctgaatggggttttctctgtcccagatcccattcgtgcgggtatacacatagaatggataggtgtcccccgccaccaccagacagtctcctgctgcgctcaagctgacattcacatcatagtctccataagaacgcttgattggaaacacaatgggattttttgtatcccaaacaccatgcgtgcgcatatacaaacaaacttccattgtttgagtatcagttggagttgagtatcccacagccaggttatctccctccgcatccagactgacactccatgaagcactacgatatttatctccatcagcctcaaacacaatgggagcgcttgtattccactcacctttccggctcatatacaaatagagctctttccccatcccaaccactaagcaatctcccgctgcattcaggctaacagaagtgccaaagcgttcattctctttaggggaaggagaaacaatacgcatcatcgtggtactgcgtttcaaacccaacaactgtgcgatctccatccgctcccaccgcgataaactgaaaaaatcggcaaactgaacctgccgatcggcatctaatttcagacgccttcccccatcaaaagagagcccaccttctagcttcagtgacagggccaaagctctctgatcaaggtttaacccgccagaatggtgagtgttgagggctagttttcctttgtcatctcgtcccagccctgcggtcgggccatcccgcttatcaccatcaatgatttcatatgccctatatgcctcatcaatcaaatgagaaaatgcttcaggcataggcggaacaccagacttaaaactcgctttcaatgagtcaacagaactcatttctttatcagtcataatatgtcctcaaaagccgtattaggcagtcaccgtcatctattctctgtcatctgttttctgtctcagcattcaataacaacttggcaatttgtttccgcgtctcctcaggaagcaatttaaaagcttgtgccgaaacggctacagtaccatccactgacaacgccccagatttatccaacatcaatcccccattgggctgtagccttaacgcaagcccctccggtttcaccgcgatgccattgccagtcttaaccgccaaacggttgtcgataacctgcaaaccgccccccggatgataagcttgagcaccatcctgccaaccaaaaagctgtcgccacaacgtggcccaatcaatcagtgaataaaacgccgcctcagtcgggatcttgccaggggcgaagtgggtaccaagctgactgaccgtttcatctgttatctctttcaccatcgtcttttcctcatttagctagtcgtaaaggtaaactttcccttcgccacttttccagccactggcaccaatcgccaatgtattggcgtcaccgctaaaacaaacaccggcaccaaatttatggtttgattccccatccagctccagtaatttgctctgcataatccattgttcattctgatagctaaaccaccataccgcaccggtttgcacacctgtgtcatttttaccaacaggtgttgacaccaccagcatctggccgtcactactcaaagagagttcgctgccaaacctttccccggcagtcaccgcttctctcaatatccctataacttgccatacattacggtgacgctggtacagatagaccgcaccaatattgttcttctctcccgggcaccccaccgccagaatattgccgctatcgctcaggctgagactggcaccaaagtcgtctttactgatggttaaaggcgaagtcagcgaattgagtggcagttgcggttgccagtattccccgtgacgatgaaatatcgtcacttcaccattaccattacgccccgttgccgccactgccaaggttgaaccatcggcactcaagctaagtttgccgccaaacatatcgccctgtgccggagaagataaggtcagacgctcaccaagctgtgaccatttcttcccgtcatactgataaagatacactgcgccgcagttagccaataaacccgatctccagccataagaacctactgctaatagtgtgccatcagcacttaggcccacagcgcaaccgaaatgctgctgaacgttcgcctcactaagccaaagtttggccgatttctcccacgcgccatttgccaatctgcgataaacgaacaccgaaccatgcccaccatcactgtttcggttatcaatccccaccgcgaggacattaccattgcgattcaaacttaacgctctgccgctataaccactaacgtaatcagcgaattgctgccgccaaccgttatcggtataagaaaatagatatacaggatcctttccttctgccccactaagcgcaatagttttcccatcgccgctgacactgacaacagcgccaaggtttttattgttaccattggccggcaagtcaaacgcgggcaactgcgccttacttgctgccatctcctcagcatgaatcagccaacggtaaagctcccttttttgttcctctgtaaaactctcaaacaattccagcgacaatttaaagtcggggcgtaatcccaattcgccattaatgaactgtaagccgctgcttttatcaatattgacagcaatttcacggtcttcgccgatatgcaccccatcaccgggattcactaagagtaaattcacttcatccagatcccggttcaatcctgcccctggattattatcgagctgagcagggtccagcccggccaaacgtcgaccttccgccgctatttgcaccaattgagcataattttcacttttcggcagggaatataatttaaaccaggatttaacttcctctttatccaacaaactattctcgctggatgtagtagatgtcttgttgtgagccattaatacctccaattccgaatgacagataagttaatgttattacacgccgttctattcttttattttcgggataaacaatattccggctttatccctctctcgatacttcctctttattctaattgaccgctttatcggtaaactttaccgaatcgtcaggcgtggcgatatgtttagccccctaaccgggcattccttctctgggtacaaacagcacctctgcggcttttagctgttcgtaatctttcttactccagaaaagctctttatcggcaaacttcgccaaatcgtcgggcgtggcaacatgtttaatccccacaccgcggattctttctgctggtataaacaacacccttacaacctctatctgtttataggtttcctcactccagtagccttcttcatcgacaaacctcaccaaatcaccgggcgtggcgacatatttaattcccaagccaggtggaatctctcccgctggcgtaaacaacacttccgcagttttcatctgttcataggtttcttcattccagaaaagtgattgatcagcaaacttcgccaaatcgtcgggtgtggcaacatgtatcacgacaatatcttcttgatgtagcggcggttcagtgggcattatttccccctattaataaaatcagaccttggctatttatagctgaaactgcgctcggcagactcgcttccgataacacttatttaatatttaacttgactacgttattcgtttttcgtgtgaaacaatcagctatatttaagcattatagaaaagtgaatttttgccagctatttaataaaattttaattactttttttttaaaatctcacataaaaagatatcgtttaaacaatattccatcagtatcgaaacaaccattaatttaattagattcaaaataattaaccaagaattttattaggacaaacataataatcaatgacatttataaatgtcacatatttatttcgagatatttctctgctacataataaaaacatttcattttaataattaagaaaatagagcgtacacttaaataataccagaatcataattattcacattaaataattcataaccgggaataaccgataaaatgacgaaaggagagacttaatatatataaaaaatttattaacagccacatcaattaccgatttaattttccataacattaaataagactaaaaataacaattaaaactgatttgttttaatatgactaacaattcatttaaatggaaaatttattatacaatagtaaagaattaagaatatagagatttaaaattaacaaaatataaaaatagaactcatcctccagatttatatatttgataataggattggtaataaataacttttcataattataatacactcactctttttattctctgctattcctgtagggacatgaatttaaaaacgttttcactttctcaagcaattgccacatatactgacagccatgatttcgtgtcaccgtttcatgtaaggattgccacagacgctcaattttattcagccagggtgaataaacaggtaaaaacaacagattaaatttaggatgacaagccagccaatctctgacccgtcggcttttatggatactgtaattatccaaaatcaaagtgagggtttcagcatgacaatactggcgttcaagttcttccaatacattgataaataaatgagaattcttatttaacccgtcagcataagtcacttttcccgtttgaacattcaggcaacctgcaaaataatgtttttggttttttcctggtgtcactatacgtttctgttgcccttttaaataccagtcagccccgatttttggattcagctcgatgtcgacttcatcttcataaaaaacgggatgtttttctgaacacgttgacaatgcctcggtaattttcgccattttttcatggtactcgggatcgggtaatttaagcgtcggggctgcccttcgccacacgatacccattttatgtaagtaacgatagaaggtactgatggataattttatgtttaataattcattgattttaattataaaaaactcaagactccagcgagaacgcaggcagcccaattgctggggagaatattgcaataaaaaagacagtaaaggataaagcgggattaaattccagacagcgggtctgcccacaggcaggcttttgagtccttccagaccatataaagtcaaccagtttatccagcgatagacagaagaacgactggcgcaaagggttttggcgaccagagagacagactcgcctcgatgcagcatcaatatggccatgagcctgcgagcataatctttatctcgggtgttctggataatttttttcatctggcgtcgttcattgcggggtataggtgctatgataggcataactcagtccgtttagtggtttgggattatctacaattgatcagattgcaaaaattggactgagttccctccaagtgttctactattttgaaaagttatttatgaagcatgagagttacctggcattttgtttaagatttcaactctataccaaaaccggtaactctcaatttttcaaggtgttgtatcaactcaagttgcgcttaatacacattaaattaacttaatcgatcattttccaaatatcttggttttggctggtattccatctgagaattttgtaccactccagtctatctgattaggcggtatgccgaactttttccatgtcaaattaaccggcactccaagtatacatgcagcaataaatcgatgctgaccatccatgatatgggtaagccctgtccgactattatgccagacaacgattgatattggatttccctttgttttgaagtttgctattttttcgtcaacaactttttgaaaaacttctgcttgagcgggtagtggtgcggaattcccaatatctcttcgtcctacagggctgccttttaatattgatgtgtcatatgtaccctcatttccttttagttgaggtccgtttgctgtttttcttaatgttacgggatttaacatatttttatacatatttaactctcatccttttgaattgtgtagggcatccgatattactgaattttcctttttcgtcacccaattttgggtattattttttatctttcctttatcattcttttattcaatatgcgattatttatcccgttatttattattctcacccagtgtaacttgatctgtttttgagctatttcgaaaatcttttaacatcagcgacggacataatatcatcatttatgaattccaaataaaacgcatgttgggaataaataacatatagattgtgtccattatttacatttatccaagatggaaaagttaaaataaatatataccctatggatttcgagatgcatcgcggcggcaagggaatgaatccccgggagcatagataacgatgtgaccggggtaagggagtgcagccaacaaagaagcaacttgaaagatgacgggtatataccctatggatttcaagatgattatagcaagccattttggaataaaaatggcccactattctattgataccgctatccattaccaccaatggtcgcggtcatacgaatttgacggttatcactgatttcaagattagataaaaccactaattgaggcaaagttctacgtaagaaacgcgataacagcgggcgtaatgcatgattgaccaacagcaccggaggcgcgcccaacatttcttggcgttgcagtgcttccgtcgcttgccgttgtaagttatccgccaatccgggttccagaccaccgccattttgtaacgcctgaattaacaagcgctcaaggcccgcatccaatccgatgacctgaatttcctgtgcgccggggaaccactgttgagcaattgcccggccaagcgcaattctaaccaaagatgtcaattcataaggatcagtttgtccaggtgcatgttcagccaaggtttcaataattgtccgcatgtctcgaatcggcacttgttcggacaacagattttgcagcactttatgcaaggttgtcagattaacaacatcaggaataaagtcctcggtcagtttaggcatctcttgactgacccgctcaaacagttgttgagcttcctgacgaccaaataactcattcgcatattgcgtcaacaggtgattcatatgggtcgcaaccaccgtactggcggcaaccaccgtgtacccttgaacctgagcttgctctctgaggctatcatcaatccaaaccgcagacaggccaaaagcaggatctttggtgatatcacccggcaattcccccacggcaccaccggggttaatcgccagccagcgccccggatgcgcttcaccacgaccaatttctacccctttcatcagaatacggtagcccgctggggccagttcaaggttatcccggatatgaacaaccggcggtaaatatcccatctcctgagcaaatttcttacgaatgccgctgatcctccccagtaattcaccattctggcgaaaatcaaccatcggaatcagacgataacctacttccatacccaaaggatcttcaagctgaacatcggaccatgaagcttctgatgtctgttgctgctcttctatttttggtttttctgtatttatcgccggcgcatcggtgcggcgatatagataccagccaagaccagctaatgccgcggtaaataacaggaaaacaaaattgggcattcccggtaccatgcccaacaatccaagaacacccgcactcaacatcatcactctgggattgttgaacagttgagtcaccatctgctgaccaacgtcctgatccgttgctacgcgagtcacaataacacccgccgcagtagaaataatgagagcaggtaactgtgcaaccaaaccatcaccaatggttaacagggtatacgcttcccccgcatcccccagactcataccatgttgagccacaccaacaattaagccgccaacgacgttgataactaagatcatcaatcccgcaatcgcatcgccgcgcacaaacttactggcaccatccatcgaaccataaaaatccgattcctgtgtcacttcagcacggcgtttcttcgcttcttcttcaccaatcaatcccgcatttaaatcggcatcaattgccatctgtttacccggcatgccatccaacacaaaacgggcacccacttcggcaatccgccctgcacctttagtaatgaccataaagttaatcaataccaagatgataaataccacaataccgatagcgaagttgccaccaaccagaaaatggccaaatgcctctacaacatgccccgctgccgcagaacccgtatgcccttccaataaaatgatacgggttgaagctacgttaagagataagcgcaataatgtggagaacagcaaaatggtcggaaatgcagcaaaatctagcgtacgccgggtaaacatcgccaccagcaacaccatgattgatagcgctatgttaaacgtaaacagtaaatcaagcatgaatggcggcaatggcaataccatcatcgacaaaatcaagaggatcaataccggcccggcaagcatttgccattgcgagcctttcatattgcccggtaaacgaagtatagaggccagattagccatgacgattattttctccagcaaaatccagtgctggcggcactggcagattttcaggtttcttcggcttcaagccgccttcccgtttccaacgtttcaattggtagacccaagcaagcacttccgcgactgccgcatacagtgtcgcggggatctgcccgccaatttcaccatggcgataaagcgccctggcaagtggcggcacctcaagtaatggaatacgattttctgtacctatttctttaatccgtaatgcaatgatccccgcccctttcgccaatatttttggcgcactcatcgctttttcatcatatttcaacgcaacggcatagtgagttgggttggtgacaatcacatccgctttcggtacatccgccatcatacgctgacgagcagccgcccgttgttgctgacggatacgcgctttgacatgtgggtccccctcttgttctttaaattcatcctttatttcctgccgggtcattctcagttttttcaaatggctgtatatctggtaaacaacatcgaaagccaccatcggtatcaacatgaaaaccaccacataaccggcgaatatcagcatttgcatagcatcatccagtgccaacagtggcggttgagctataagccgtaacatggcaggccagttcatccaaaggaacaaagcagcaccaataccgacaaatcccgctttaagtaatgctttgaataattccgccaacgcattcattgaaaaaatacgtttcaggccagaaatgggattcaattttttcggatcaaatttgatggatttggtactgaacactaatccacccaatagcgccggggcacttaatgcaactaatactaatccagcaaaaaccggcagcagggccaaaacagcctgttgcagcaacctgccaatctgttgaaccatctgcttatcattgctgaccatgctgtgatcaaagctaaacccttcaaacaccatcaacgacaattcatgcgtcattgactgaccactcatccagagcaaacttaaaccactggtcaacatcaagatagaactcagctctctggaacggactatttgtccctcttttcgcgctttttcccgcttatggggcgtgggttcttctgttttctcaagatcgctatcttcagccacggctttccttgtcagattttcaaacgctatcgatcagaaaatatggaatcaaatggcggttagcatgacaaaagagaaaaaatccgatggctggaacaatgagaaatttgaccgggtatttgcgggatagagctagcagcaaaaaattcgattttattttcattaatttctgaacttttctatatctctttaactcaaatatattgcattaccgatcaattattaccttttaagttgtaacgatacggtaattattttagttaaaaaaaagattaatgtggctagtcaaaggggaagtgaagtagatggcaatagggtattacctgctggttggtgacaaaactacctgtggtggacagattattacgggtgatcacaccatgacatttaatgggcgagccaccgcgcgtgaaggggataaagttacctgcggcaagcatcccggtacttatatgattgtcggcggcatatcagatatgtttgatatggggcaacgattagccggcacattggatagtgtcagcacctgcccttgccgggcccggtttatcaattcggttatggacagctacgagaagcaggaacagcctcgtcaacaagcggtaacacctgcttatacggcgacgcaaaacttctcatcaccaatgaaggaagcaacaacagttcagtccaatcctccaccggtgacacaagtgccgcctccaccgatcccggtatttgccaaatctcgtcaacggggcaaaggctgtaccgacgccggtacggagactgaaccggcaaataatttcggtaggatggggatatatcaggttctatcatcgcccgcccctgtcacggaatcaaagcctgaacagcctccgcaaggcaaaaaacatccaccagaaccggataagccacaggataaaaaattaccgtggtataaacggtggtttagcaatagcaaagataaagccgaagccgctgcgactgctgtagctgcaacgactcgcagcgcggtagcggatggcgaagcgctggtgatgcgtttcattggcggtggcgttactagtgccggacgttggctggcagcgccgaatccgttgacagtcggattaatggggttgttttattcatcggggttaaatgaaagcgaggaagattacttaaaccaatatcatcttagtgaaattgccagtcagtatggtaaagcaccgacccgtgtccgttttcgctggatcagagatgaaaaaagcggcaggatgacggttcaggggtatcacgtcagcccagaaagtggtctggataaagtgccggttcgtatgatgaaacggaatccagtcaccggtaattatgagttctgggaaccaggagaatatcggccaacgattttatggacaccaaacgatcaggaattcaaagttccaccccataccgggaatgaggaacagccgtttattccgtcgcagataaccgtattgccgatcccggataaagtcggcagcgatattgaatcgttgccaatgccggaagagaaggattttcgggattatattctggtctttcccgccggttcaggaatgaaaccagtttatgtgatgtttaatactcctcggaaccaaccgggagtggtaactggccaaggacaaagagttgaaggtaattggttaagtctcgcaggacaagatatgggggcacccatccctagccagatagcggataagttacgagggaggagatttaataactttgatgatttcagaagggcattttggaaagaggttggtaatgatcctgagttgtctcagcaatttaattcacataataaagagtttttaaaaaagagttactctccatattcaccacgacaggaacacattggaaatcgagaaaaatatgagatccatcatgttaaatttattaaagacggtggtgaagtctataatctcgataaccttcgtgtaacaacaccaaaaaggcatatcgaaattcattcaagcaaaggtggaataaaatgaagctaaataaaaagttagaagattatacagaagctgagtttttagaatttgccagaaaagtatgcaatgcagactatgcgacggaagatgaagctaatgttgcagttcaagattttatccgtttatcagagcatccagatggtactgatatccttttttacccatcgtctggtcaggatgattctcctgaaggaatagtgaagcaaatcaaagaatggcgagccaaaagcggtaaacctggctttaaaaaatagcaattaagtcagtgataaaaaggatttttataatcctttttatcacggttaagtaaggttaatacctcacacagctatcatattggtattgaatcgttgccaatgccggaagagaaggattttcgggattatattctgatactccccatcccgaatatgccgccggtgtatgtgtatttgagtaaaccgccggtgaaattgtttgaggtggatttgtataaaaactttgcggggagactgaggaatggaacacatgcagatcatatgccttcggatgctgcggttcaggcttactggaaaaacctttatccagaactgaaacccaagcaactggaaagattatcgaaaaatgtagcagctataattattcctgctgatgtccatagaaaactcagtgcgacctatgggggacgtaatacccctgagcaaatacgacaggatgcctgtgacttacggggagctgtcgatcgagattttaatacgataatgccagcattacaggaatatggtgcaacagagcgtcagctcgaagaagctagagtaaaaatgcataaactaaatcaggaacagaggttatacaaatgacagtaaatatagaatcattaataaacagtttggggaaaacgtatcaggaaatctttgatgcgggactcattccctataaaaccaagccaacaggaaattttggcactgaatatatatctctagatatggttaaagaaggtgtttatcttgcttttaaacggaaggataaaattttatttgatgtgacacttactctactagatagtgataaaccatcatacacatttccaaatgagttaccatcaccgctgatctcacatatgtcacgtcagtggatccatgaacaattcggattgcctgaaaagtcaaaagaaccaaaagtgataatgaaagaagagtttgggtgggttgatttgtacacgatactagattttcgtataccaactaacatgcaagttgattatgatctatcagatcgcgttaaagaagtgacatttctacccacctcagaagtacgttggtggtagtcaaaaagaggagattttcttgagagccaattcattaatcagcagcttaaaaggttaaattgaagatgaattggcttaattgagaaaagaggttatataaataatggcgattaacattgaagtactaattaatagtttaggtagaacttatcaggaaatttatagtgaaggattaattccttataaaacaaagcctaaaggacacctaggctgtgattatatatcattggatatgattaaagaaggtgtgtatttggcatttaaaagaaaaaataagattttatttgttgtgacaattaccctaattgatcgagataagccatcatatcaatttcccaacgagttgccatctcccctaatttcgatgatgtctcgtcaatggattcatgaacagtttggagagcctgaaaagtcgcatccgcctgagatgattatgaagcaccagtttggtcgtaaggacttatatacattacttaatttccgtgttccgacaagtatgcagatctcctatgatttacttgaccgtgttgaatacataacactcctactcacctcagaagtgtgttggtagtcaatataaagaggaaatttttcttgaaaatcaattcattaatcaatagattaaaaaattaaactgaaagtgaatttgaatattggaacaggaaataatgggatataatacttgtccttgttgtggtaaacagacaattgaacgtttaggcgaatatgaaatatgttcgatatgtcattgggaagatgatcctgttcaatcagcagacccacatttttcaggaggagctaattctatgagtttggaagatgcgaagaaactctatctttcaaagaaagattgattttagagttaaatattctttgtcgtatttcactgtttttcttgtaagtggttaatatttacatgaaattactatcaaatgaattattcgcataacattatcaataagaaatagtggcttacaaggactaagctctgcaaccagcagagcttagtcataactataataaactctgtaagaatgagagcgtatgtaagatggaattgaaaaacaaaagttgacttcaagaataatatcgaatgaaggtacagaagaatagcaatattctagtatttccagtcggttcaggtgttaaactactatccaccgaaatcaactagagtgatagctggtaggaagcaaaaagggttatacaagtgacagtcaatgtagaggcattaataaacagtctagggaaatcttaccaagaaatcttcaatgaagaactcattccttataaaaccaagccaacaggaaattttggcactgaatatatatctctagatatggttaaagaaggtgtttatcttgcttttaaacggaaggataaaattgtattttagtcagtccatcaataccttctagaaaatgactaaaacgctcgcttttgccaatatccaaacgcaagcgatgcaaacagttcagtcatatattaccccttaagtgggatttgagctttttgtagagtgcgtcgggtgccagatcaacatcattcggccaacacactgcgccacactcatcaacacgcgcttgggcaaagaattcctgctctttcagtggctcgaacatgggtccgaacaaccgatccgcgatgcacacctctccataggtgccatcatcgaacgtcaccgccaaggtgtattctggctttatttccactttcgttactctgcgcatgataatctctccagtggttcaatcttgttgagaggcggattatggttaatacatccagatcaagatgtcaaaaaattcactgatagttggcatttgtaatggcctgagaaacaatgataatactattcaccgtagcattaagattgacactactcaaccattaaatacgagatataaatatcgagaaagggaatcctttagttggttcatcaacccctaaatacggatacccaatatttcccaaacagaacattcacgacactgtagtgtgcaaggattaatgttaaatgtgttagagggacagatagcttattatctcaaagagaacagtcactgaatatttcctgcttagaaatggatatgttagtaacggcttaaccagaactcaggttatttatacccgttatccttcaaattgcctctttgttggctgcactcgctcaccccggtcacatagtttgctatgctcccagggactctctcccttgccgtcgcgatccatcttgaaatccatagggtataagttaatttccatccgaaaactcattaccgccactcattgaaattattttccaatttaaatattagattaaaataatttcaatcgttatttccacctttatcattacaatagcatattatctctaatatatttctccattttattttcagtaaatttaatattccataggctagtacctgatccccttcatgagatgctcatatcatccttttatcactccaatgacttatcctgatttataattaccttcatgaatatcatggcattctcgcaacccatcaagcactagcacatatttaatttatcccaagttaaacctttaattcctctggcgttccctctctatatggcaccagcgtcgtcctatcttgcgcatcaaccgcacaatgattattaccgacaacaagcataaccaaatcgctggttgctttaatcgcgtgatctatttctccattcacaaaataacaaactccaggctctattttatgcttttcacccgcataaataacataacccgttcctgcgaggacaaataagatatgatgccctaagtgagtatgattctgcatcccctcatctttgctgaaacgaattagatcagcaccaaagccatcaaacgaaactaatccctcgcccgttcccatactgttaaccattttatgatttctggccattgtatcgacaacaaggtgttcaccgttccagtgacaaaatctatttttaataaattccatattaccttccttttatctctacaaataaaattttattttaaagtgactatcatttctcttggttaattgaattaacattatctctctatcaaataaaatgatatttcacagtaaaacctcaatcatcacaaactcatatcgataaagaaaccaactagttattaacaatatatcaaatagaaatatataattccatagtagtattttacaaaagctcactctgtgataacaatcactgtaaaacgcttattttaaatttctttgtagaatataatccgagttgaaaataatatcagaaaaaagtcaggttaattatattattaaattaggacaataatggcgttaattaagcttgatcttaaccctcactaaaaataattatttcaaagatatatataccctatggatttcaagatgcatcgcgacggcaagggagcgaatccccgggagcatagatagctatgtgaccggggtgagtgagtgcagccaacaaagaagcaacttgaaagatgacgggtatagatctgatatttcatctttatcacaagggtgaacagcataaattgtgcctcaaagaaaccccacaacctcttacgaaattgtgggatctccaccatgctttctggttttcctatcccgcttcactgcttactgttttgcaaccacggattcattgtgaggtaaccagtaacgccgatgttcaaaagcatatttgggtaatcgaatacgcaacggtttctgcccggaaggccagcaagtacgccaatctatatcttgacctcgtaaccataaaaatcgagagtcatcttccgccatatgaagccattgatcttctttcgttgccgtagacgaagcaaaatcccgtaactgcttcaaaagatcctgtcgtgatgttgcaacgaacagtgcccgataggataacgctgccctgccaaactgtaatgtccagctaaccgctggtagttcaacgctttcatcattctcgataaaatcccctagcatagccactattttttgtaacgatgcctggctattagccgagatgggataataatacccctccaggttggctttaatctgttgctgcgcttgggttggtgcctcctctaaaatgacatgggaattgctgccccccaatccaaaagagctgagtccagcgaaacgcttttgccctgcccccactcgccaagaattttcctctgtagccagttgtaaacgtgaatccacactatcaatttcaggattcaaacgctgaaacgcagcgctaggtacaatagatttatgctgcaacattaataaaactttaacgatgccagctaaccccgcagcgccttctaaatgcccaatgttggcttttactgaaccaatatagcaaggttgtagcgttcctcctgattcatcgcgattaaagacctcattaagcgcattaaattctataggatcacccaacgaggttcccgttccatgtgcttcaaggtaactgatttgttccgcagaaattccagcctgtagcaagcaatctttaaccaacgcaatttgctgctcagggttaggtgaagtcagtgaattagcacgtccaccatgattaaccgccgatgcccgaacgtatccataaatcggatcccgatcctctaatgcctgtttttgcgttttcaagaatagacagatagccccttcaccacggacaaaaccattagcatccgcgtcaaaaaccctacaacagccatctttagataacatccccgcccggtaataagcagccatgttgaatgtgttgctcaataagttaacgctgccaactatcgcctgttggcattccccagaacgcaatgaattcaccgcttgagtcagtgccgtcaatccacttgaacacgcggtatcaatttgcaaacttgggccaataaagttgtaataaaatgacaatctgttagccaagaggcaattcagtgtccctgtcggcgcataagcatttgccatcgccatatcggccgcaaccagttcacgataatcattactgcacgagccaataaaaacacccgtctttgatcctgaatagccaagcggattcgcaccactatcttcgatcgcttgccaagtcagctctaatagcattctctgttgcggatccatcatggccgcaactcgcggagaaataccaaagaatggcgcatcaaaaccatcaatactatcgagcaacccggcttttaaggcttttttcggcaatggaatgacgtaaggtttcccggatgcaaaccgctgctcgggaatctcttttattacactgtgtccagatcttaagatctcccacatttgctctggggaatcttccgctccaggcagtcggaaagccatgcccacaatagcaataggcatctgtttggtatcacccgcactacttactgagggagtaatggaacttaaatgttccaacaaggcagatttagctatccgttgttcatccggactaagcgaatgatatatgtggtgcagattatccatgctttcctccttctatgaggcgctgtaaccttaatgctgcttcgccatcaagaccacgcatcgcattaataaagtcatctaaggaatgtttgttctcagtcagttcagttttggcagtgtcaagatattcaatcaatcgatgcggtgaactataacgccagaacagcgtcggcgataatttccgacgaaaatgcactgacattaactctgcaagctttactgccttgagcgaatcaatgcccaaatcagcccaagtgcgcggcatcattgattcagtaaaatcttcgtcccaatgcaggaaatccgccagcaacgtgcgtaattgcccggaaaccgatttacctactttaccttctatctgatgtgcggcagatcgtggcccagacagagcacgaacctgaacaataatctcggaaataaactcagatgcctctaccccattgagcagatagtgattaaaggccagaacgaggctcatctctttgttgtgaggcgcaccaatgaacaatgttgactgagatggcggcacaataacaggtacggcaaaggtagcaccatcgttgccggtataggagatcatcataggaacatcaatatcaacaggcagtttttccgcatcgggatcaagtacaccattcaagtgttgcctgaactcaaaaaagctcatggtctgcgtgttcggtacttttaatgaactcaaatcgcctttctcatccagaaaagcaatacccaagttgatatccgtataagtgtgataacgctcctgatcaagcggtctcgaacgcaacatcgggaattttttcaacgcctgagaaatcgcataagtgatgacctgaaatggcgttatccactcctgctgcccggaggtttccgttaaatgatgaatggcgttatcaacaagctcaatcggtagtggtttagctgcccaacaaggttgtaccgcagcactatttaaccgtattgcacgattaagacgctgctgatctctggacagaaaacccacattgtcattttctgtattgctcttttctgatggcctggtttcttctgatatcttagtttcgcggtgctgctggaggtaatcatctatatgaccaggcaataatgtgccatgtttttccgccagttgactaagaatgagtggctcaatttggtgctcttgtgcgtactgacgggtttttggcggaatacgcgcaggaggagcggagacttcaggagccgcctccactttctctattttttcgacatcctccgccactctctccattttctccggcggaggcgttaacgcttcactgacaggggaaggctctgccatctcgccaacagctctgataacggcaataggagatccaacagggataatatcattttccgccgccaaccatttttccaagatcccctcaacatcagattcaatggtaaaggcagccttatccgtctccatttcataaacaggttcatcacgtttgacatgatcccctacctgcttaagtaattggatgatgacgacttcagtggttccttctcccatcgggggaataagcaactgtgccataagttctccttagctcattaccgcatagacggaggctaaaatgtcatccgtgccgggtaaaacagctttctctaaacaaggattaaaaggaatatgaatatcttcacgcgtcaccaaacgcggaggtgccaataaagagaagaaattgtcattctcatccaaaatatcagcaataatggatgcaccaacactggccgtccgggtatcctcctgcacaacgataagccgcccggttttgcgtaaagattccgcaatccgttgtttatcccaaggtaccagactacgtaattcaatcacttcaatgtcaatattgtctttttccgcctgaagagccgccatcgtcgcaagctgagtcgtatttccccaagcaaccagtgtaatgtcctttcctgccctgacgatatttgcctgcccaagcgacactggactcaccagccggcgttcatggcgctctctcataaggtgtttagggatcagaatcagactcggcatgtccagacttaacgcggtacggaacaacgcgacggtatcagccggtgtcgttggaaccagaacgttaataccgggaatatgcgccaggataccgtccgagctttggctgtgccatataccaccgccagggagataagcgccataaggagcatatatcaccaccggacagcgccattttcccaccgttctccaacttaaagtgccaagttgtgactgtaactgattgagacctagcccaacaaagtcaataaattgcagttcaacaatcggacgccaaccactggcagataacccaacagacgagccaataatcgtggcttcggaaaggggagcattaataacgcgatcaggatagcgagtggataagccacgggtgaaaccaaaaacaccacctttaggatcttcaatatcctcaccaaatatcagcacattcggatgctgactcaatgcctcgtccaaaacttgatttaccgctttgacctgtgtctcttcggcttccatctcaacatgtacggtaggcgtcccttcacgattgcataaataggtactgacacttgcaggatcaggctcttcttcgtggtaaacacgctcaaatatttccgcgacatccgctttaatgcgctctttttgttcagccagagcttgctcggtaatcgctcctttttcctttaaataagcgacgtaattttcaatagggtcctgtagtacctccagctcatccggggtacggtacagtttgtgagaatctgaattggagtgagaatctaaccgatccatacgacaaaccaatatgcagggagtccgctcaaatcgcgccttattgaatacctcctgtgcaacagtaaacaaagtttccggcttacgggcatcaacacgacggatcaaacactcgttaaatattcccaatcgatacggagccatcttctccgttgaggtactaatacccaatttattatcggaaaccacaaagacgactggcaaacgcttttcaaccgcaaagctgaccgcttcataaaattctccctgccgagttgccgcatcgccgacaccacacacaacaagcccatttttattgtccaacacgcttgcccaagcagcgccagccgcgggaatacattgggttccggtcaagctgactaccgagaagatattatgctctttggagcagaaatgattcgacatggttcggccggccgagtgagaagtggccttacccataagttcccttgtcatttcaacaatagacataccacgcgctaatactaacgcccgatcacgatagtaaggaaccagtacatcatttttttccataagctgaggcaacacagccaacccttcatgtccagcagccgacacatgaaaccaagctcggccttgtcgtgtgactatcgcactacgattatcaaattcccgtgacagcagcatgtcataaagtaacttttgctcatccaaacaatcattaattgaagggctgtgttccttaagaggtacttcattgatctgtacgtctatcactctctttttcctcacaaatagttaacgtggtagttgtcgttattgcgcttaatgcttgataaaaaagcgaacacggggtagtcccgttcatgattacttgagagactatagatcccgataaagaagtgaatgtagggttattacctacacgaattgcaaaagatagagatatacggccacaatttttaattacgtttatacccgtcatctttcaagttgcctctttgttggctgcactcactcaccccggccacatagttatctatgctcctggggttcgctcccttgccgtcgcgatgcatcttgaaatccatagggtatatacatctaacatggggggaaaaattatctccataaccataaatggtttcggctgtcatggtattccctaaatttttagcattgtcctgaacataatgtgacaccatttaaaaaactccaaccgatgaacaacagccattcgttaagagtaggaccaacaagcgccggcatttccatgattacaatacaatataatcacaatacgaataatcacaatacaattaaaaaacaggttcttacctatatctttgagccctgcaatgataagacataggaataattcattactttgctaaattattttgataatcagattttttcgacaagctcttcattaggtatttttatgtttaaccaagacatagcctcaataataacacgtattatatcaatcgaacttgagactttatgctcacattagaattcattatgttttgtgatgaatatcaataatgacctcctcatatcaaacaatagataaagctgaattgatgaaatcatccaacatcaatcctgatattttatacaaatttagcttattatctcttatgttttatcataaaaaaaactgtagtaatgcgggaatgatcacaaaaagggcagcaaaaaatttaactatatgattattatgaagttatcatcccaaacagcgctgataatataatgcaattagtaggatatcaacatatatccgttatctttcaagttgcttctttgttggctacactcgctcaccccggtcaccccggtcacatagttatctatactcccgactcccggggattcactcccttgccgtcgcgatccatcttgaaatccataaggtatataaaaatatattttataggtttttgaatatattaccaatcattcaaatagtaaattaaaaaaatgataagataaaatataatttccaaaagattgattttaatgaacttatctctataaattatttcgataaatatagaataaaatagatcattttcatacttcgaaaaatgattaattcatgcaattattcctatttcagatattttctctcatttcaaataacaacggctttgacaacccccttggtttaacattgacaaacagctccagcactttcgcaccatgccaatcattcctgttgatcttgcaaatgcaaacctgaacactcggtggtggtcatccattccactgttacttatcgttcatgtcaaatttgcgtattcgatcacaatagttttatctggttagtcgacttgattgcgatctgccaatcaactcaattatcttttaatccaaaaaaaccagcttgataatttagctacgatataataactaatatcctaaagagtacagtatcatgaagaaccttcgctatctgattgtcacaccaggattaatgctttcggcctcagtccttgcttcacctgctaatagcatcgaagcacgccttgatgcactggagcagcgactacaacaagcagaacaacgagccgcccaagcggaagcgcgcgccactgccgccgagcaacacgcacagcaactagaacaacgcgctatcgaaaccaaacaacagaccacacaagtagcacaacaccccacttcgcaggaaaatagtgctccatcaaccagcaacttgaaattgaatgattttggcgatctaaaattgtatggcgatgtagaattcaatctcgatagcgccagccgaaccggtcagcttacttcacttaaaaccagcgataataaagactggaaacctggcgacaaagagcgttggaatgttaatggccgcattttgatcgggctggacggttaccaccgtgatcaaaacaacaactttgccggctttagagtgcaaccattagcagacatgactggcaaaatgaatctcgacgacgccgctttcttcttcggcaatgagaaaaactggcaggtaaaaatcgggcgttttgaagcttacgatatgttcccactcaaccaagatacttttattcagtattctggtaatactgccaacgatttgtatgccgacggtttcggctatatctacatgatgaaagaaggacgtggccgcagtaatagcggtggtaacttgatgctgagcaaatacgcaggtaactggtatttcgaactcaatactctacttgaagatggcacttcactattccgagataacacttaccacggcaacacactggaaaataaaaaaaatgtcgcctatttgcgcccggtagcagcctggaaaaaagatcagtttagtgcagccatagcgatggagagtaatgtcgtcaataacgcctatggctaccagaataatcaagggcaatgggtcgatcaatccagacgcaatggttacggtatgacattaagctggaacggcctggaggccgatcctgatgatggcattgtcgctaacctgaataccgcttatctggatgcctcagatgaacacaatttcactaccggaattaatgtgatgtggcatcgtttcgaactgggttatgtctatgcccataacaatatcaaagcgttcaatactgacgatacaaccgcatatattaatcacccattcaatgagccgggtaaatacgatataaataccatccatatgtcatatcagattcctagtatcatgaatatgaagaattttaatctctatcttggggcctacgtctctatgttggaggcaaatgatagcaacaaaattgccaacagtaataatgaccgacgctacggtgcacgtgccagatttaaatatctcttctaattgcaaactaataagccgccttgaggtgactcttccaacaggtaaacgcatagctttccacctttaaggaagaaagcccgctctgcggactcagattattgacaaagtgctggtttttatccggcactttgtcttaattaacctcggtttcgtttaaaaagccataaaaaccagcccgtactcgtttttcctcgctgctcaactccctcaaatactctatgacggggaatatagaggttgtgacaaacagcaattttggtcgaatcaataaaagcggttgatgatataccaaagttaaaatcaattaagattaatatcatattctaatacctctttatatgtaaattttttttgccaaattaaaaataaagacccgagttgacattgtatactttgcgttctattttttatttaattttagtgaacatatttttattattggactgcttatatacccaatggatttcaagatgcatcgcgacggcaagggggtgagtgagtgcagccaacaaagaggcaacttgaaagatgacgggtatatattgtttcacccggcaagaaaggtaatactattgaggtcattaattccctcaaaaaacagttgctataatatagtaggtttttttaatagcctatttatttaaagttagctctcttacttatccagcaatatcctttactatctgatttgtcagaaattgattgattgactttgtagatcgacaaaaagcatggcagtgttgttctatgctaaatcgagatattcttatttataggtgttttttaaaatcattaaatatataccctatggatttcaagatgcatcgcggcggcaagggagcgaatcccctggagcatagaaaactatgtgaccggggtgagtgagtgcagccaacaaagaagcaacttgaaagatgacggatataactaaataattttttgagttaatcagtattaactgttttttcccaagatatcgtaattaatttaatacgatgtcatcgtaattcaccctaataaagagatattacaatgggctggaatatatttattaacgcaccagatagttaccatcttacttccacacatatccgcaacagcttgcaccaacaaggttttgccactttcaatgccaccgatcttgacctttctgacagtgaaaaaatcgatcttatctctctgtgtgaattatctaagtcactgccgttagatcgatttggtgaaggtggtcgtcaccgcagttattgtgagggagtgtggcaccgtgaaacagaaactattgattggaaaacaggtcatcagcaatctgatggtagtatagagattgattatcatcagggaagtgaatatcaacctgaatttggtggtgtggtacgaaaattcctgcgtatgcctgatgagatacttaataaagggctacttaataaactcatttggcacgatctgagtctaaccggcatggcagaacattattcccgtttgctatgtggtgtacatctgatccgaatgcaggcactaccgggtaaaccggcaaaaattacgcctaactgttttcatcgtgacggtcagccgttcaccgctgtacatttaattgaacgttacaatatcgaaggtggtacaacgcatatcgcgccaccttcttatgcgaattgccagcttgaagaagtccctgctcatgagataactcgttttctccttaatgatccccttgatagctacatcatcgatgatgcagcgatttgtcattacatcaatcccgtaacttgcgatgaaaacgctagcgttggcgtccgcactatcattctgattgatttcaccccactagaacagattgacaggtgttcccagtagcgcttttgccatgaaagtggctgacacccaggagtgatagcttttacggcaatcactaagctgcaaaaatctttttatcttaggaaaaatttcgtgagtaattattcaaacaccttatcgaatgttccattcttattgccaacgccggctcaacgcaggctatggcttattagccaaggaaatatggactcagcattatataacgtgccattttcgctacgtttgcgtggtacgttagatagagaagcacttgaaaaaacgattatttttatgattgagcgtcatccggtattgcgttcacaatttcatgttgtcaatggagaattacagatagtactgaatccgcagtggcctgaattacgtatcagtgatctcagcgattattccccggaggaacgcgaaaccaaaatacagtcaatctgtgataatgaagtcagatattgttttaatctcagtaacgatttgccttttcgttatttactgcttcgtcggcaagagaacgatcatcagttaatatttacgctgcaccacattgtatttgatgattggtctactcacgtttttcttaatgattttagccatgcctataaccagtataaagtaggtcaacagcctaagttggcgacgattacctacccgcatgtcaatgattctataacagatattcatataaatagcgctcatcggcaacgcttacgcaactattggggaaaacagttagtggaattgcctgaactgcataaattacctaccgatcggccacgactcttggaacaacggggacgtggcgcggtatatcataagtcacttcctttatctctcgttggacgtatttctaaaatctgccaacgttatggattgacaccttatatggtggcgatttccgcttttacggtattactgaatcgttattcacacgatgacgacatcgttattggcagtccatttgcgaatcgtcacaatattgatgaacatgtccgccttggcttttttatcaatttgttaccgttgcgttttcgcgttaatgaagggataagtttcagtgatctattggtccaagcacgcgatatattacttgatgcatatgaaaatgctgatttgccgtttgatgagattgtcgatgtggtacaacccctgcgttctctgagccattcccctgtttttcagattatgtttgattatttgaagagtccgggacaagcattgcaactggatgggttagcagcagaagtacaatttatccattctggtactgctaaatatgatttaacgttatcgatagaagaatccccaagttcactactctgtctggttgaatttgataccgatttgtttgataacctcaccattactcgcatggtgaatcactatgagacattgttggatgcattgctaagtgaacctgagcgttctgtcgccaaatgtagcatgttaccgccagaagagctggaaacactagctcgcttctcccggccggcagaacctctgccggtattggaatttatttcggtagctgaacgcatcaagtcacaagtgcgtaatcatccagatgcacgggctatggtgtggcgtgatcaacgtttcacctatgcgcaactggacgagtacgcgcaatacctgctcgcgaagatgcgccagtgtggcgttgggccgggtagccgggttgcagtattgatgagctaccggccagaaattgtcatctctttttacgctattctctctgccggtgcggtttatgtgccgttgtccccttctgatcctcgcttcgccgataagataaatgatgcacaaccagtactgatcctcaccagtgaacaggatgctgttggtttgcttgattttcgtgccattatgctggacgttgatgagctgtttcgtcaacccgcgccgccggatgtgcaacccatttggccagttcaggagagtgattcagcctatgttatttacacttctggttcaaccggcaatccaaaaggggtggaggtaagccacggtagtctgcatgcatcgtaccatgcttggtgccatgactatcgtttcacccaacccggtgagccggtatcactacaacttgcggcaccgattttcgatctcagtataggggatttcagtcgtactctgggctgtggtggatgcttggttatgtgtccgcgtgagtggttgctggatgcccctgaaatgcaccgcttaatgatgagcgaaggcgtgaccttcggtgattttcctcccgtggtactacgtcaattaattcagttctgtcaggataatgggaaacgtctggatggattatcaacactggtgtgtggggctgatgtctggttcggtcatgagctgcatgcagcacaagcgctgtgccgcccggatgcgcgtattctgggttcttacggtgtaactgaagcaaccattgatagcactgtttttgatccggaaacacatccattggaaaccgggcgagtcattccattgggtaggccgctggctagctgtgagttgttcattgttgataaacacctgcaacaagtgccgattggcgttagtggtgaattgttgattgcgggtgttaccgtagcaaaaggatatctcaataatccccaactcacggcagaaaaatttattaccggcaaattcgatagccatggccgttttgtggcagacggccttgtagcagagaatagcagtacgcgattctatcgcacctcagacatttgctgtttcctggctgacggcactattgatttcatgggacgcagtgatcatcagattaaaattcgcggttttcgcgttgaattaggcgaggtggagagtgcattactggagcacgccgatgtgcgccagtgtgcagttgtcgcctgtaatgacagtacaaataataaagtgttggtcgcctatgttgtgtcatcggctgatactgacaagttacgtggttatttgtccctgcggctacccgggcatatgatgccgcgtgctttcgtgtttctcgataaattaccaaccacccccaacgggaaggttgatcgcaagcgcttacaagttccggatttctcactaccagaaaatcaggagtctatgacagaaccggctaacgcccgtgaagaacaattgctggcattatggagaacagcgttaggagttcaggtcatcagtactgaagataatttcttctattgtggtggtaattcattaattgctgccaatctgattacgcagatcaataagacatttagtgttcagcttaaactttccgctattttcaaccatccaactatcgtcgggttagcctcgttactgggcagtgttgaaaaagatagtattgaaaagaacagtattgaaaaggacggcgttgaaaagagcaatgcgaaacagagtgttactgtgcagcacgtttcgcaggtcagtgatttactctcattcggtcaacgcagtttgtggttgattgcgatgcaacgaccggatgattgcagttacaacgtgcctttcacattgcgtctgcatggtaatctgcattttactgcgttaatgcaggcgctgaatgacatagtgcaacgtcatgacgtattacgtaccacattctctagccaagtcagcaaagtaagcgagccagatggaacatccagttttgaacctagtcatcaggttgcgtctgaattaacgctaaccctgcgccagcaaaatatctccggcggtgagtctgcactggcatcgaaattgcgggaagagatgatggcaagtttcgatctcgtcaatgggccactcatccgtgcggtactgtttacgctgtccccgcaagagcatgtgctttgtattactctgcaccacattatttccgatggtcgctcactggcaatactttttgatgagttacggcacggctatcaggcacgtctggccggtaaggcacccatgctacccatgttggaagcaaactatgggcatttcattagctggcagcgctcccgactgactgatccagcggtgcagcaacagattcatttctggcgtcaacaattggcggatgcgccagcgactctgatactgaatgagatggcggcaccaactgacgaagcggctgcaataagttgtgctattcctcatgtgtatgttgaaggtgtagagaaactggctcgtgagcaaaactgtacaccgtttatggtctggttgagtttgtttgccctcctgttgcgccagcagagtggggagcaggatcttatcgtcggcacaccagtgtcgctgcgcactatacctgcatgggatacgctaattggctactttgctaacactttgccggtacgtatcaatagccgtgagttgcaaacttttcagcaactcctgatgcacacgcgacaggttagtctcgacattcttgaaaatcgtgatttgccgttcgattatttggtacaaacacttaatttgccgcgtgtggcaggtaaaaatcccgttttccaaactattttttcctgtgaactggatcaaccaaacgatgcaacattcggggacatgaaggtttcagacgttgagttgggggactatcgcgccaaaattgatttagagctggcaattaatcgtgtaaatggtcaggtttacgctcattttatggccatgccgggggggttatctgccgtcactctgggacggatgagtgagtatttgctggcgatgttgccacaactcattgaaaaaccagatactgcattggctgatttgttgacggttaattctgaccgtagtgctcaaccagaactcgttgttgataagccacaaggactgtttcagttgtttcaacagaacctgtcccggtatggcggacatgtggcgctggaaagtgatgaattaagtctaagttatcagcagcttgatacattgaccgcatatgtggcgcaacaattacaacaagtaggtgtaggccgaggtgatcgagttggcattctgatgggacaccatccacataatgtcacggcaatgctggcaattaaccgaattggtgcggtgtttgtgccactggctcctgataacgccgaaccagcaaatcgatatgtgattgataatgcggaaataaaagcgatattgtgccgaaatgaaacagcgcctctgtgtcagcgtcttagtctggcggcaatgaatatcgatgagttagatatagccaatgcaccttatatgactatggcggcgatctgtcagccggatgattgcgcttacgttatttacacttctggatcaacgggtaaaccaaaaggtgttgctgtcacccaccgcagtgtctgccataacattctggcaatccgcgatgagctgaggcttgaaccttcttctcgcatagtgcagtactcctcgcccgtatttgatgtgatgttgggagaaatttttccagcacttgtagcgggtgcttgcgtggtcttcgctaataaacagcaactgttgcctggcagtaatctgacagagtggctggcacataaacagattacgcatatgtggattgtcccttctgcgttggcgatagtgccgttagtaccgctgccaagtctccaggtgattatcgtaaccggtgagccttgtatgcccgaagtcgcccagcgctggtctgtagggcgcaggctgatgaatggatacggccctactgaatgcgcaattgtggtatcccttaccgattatcatgccgcagggcaaaatctggtgctgcgtccaatgggcgatgttcgcttccatctgcttgatgaacagagaaagcccgtagcaccgggggaaatgggtgaactttatttagcgggaacctgtgttgcacagggctatctgggtatggatgaaaaaaccgctggggtgtttttacccgatagctttgcaccacaattaaaggctcgcatgtaccgtaccggcgacattgtgcgtcaacgcatggatggcgcactggagtttattggtcgggttgaccgtcaggtaaaaatccgtggttaccgaattgagctgaatgctgtgcgtgctgccctaagtgcgctaccgggtgtacgtcaggccgaagcactggcgatcaccgatagccaagggaataaagagttggcgggatacattgtcggcgaaaccagccgtagtgagatcctgagcgcattacgccaacaggttagtgaggtgatggtgccaacagcgttgttctttcttgatgcactgcctaccggcattacgggaaaagtcgatctgaaagcattagctgaaatgaaactgacacgtgccggtcagcatcaatcttctcctttgccagccaaagttgtgtcatcactcagtcgcgttgaggctatctggcgtgaactgctagagagggatgaaatcggttatgacgaaaactttttcgatgctggcggccactcactacgggttatggcgctattccagcaattgaatgaagcgtttggtgtcaacttgtctgtgaccgatattttcgcccatcccaccattcgacaacaggcgcaactactggacacgctgtcgcaacaaaaaacacccgttacagtcgcagtcacaccgctgatagtcactgaaaagagagcaataccaacagcaataccaatgttggatgtttcgactcaggatagcaatgctattgcgattattggtatgactggccgcttcccacaagcgccagatctcgacactttttggcagcggttgttggcgggttacgatgccagtgtggagttgtctgacgaggaattgttacaacggggcgtcaatccagcgctgttaagtcacccacagtttgtcagacgcgcacgtttgctggagggttgtgcggagtttgatgcacgcttctttggttattcatcacgtgaagcgcaggtgatggacccacaacagcggttatttcttgaaatggcatgggaaacgttggaactctctggctatggcaatgatagtacaccgcgttcagtcggtgtctttggtagcagtggcttcaattattacctgctggaaaacgtcatgccaaataaagaccggatgcacctcgaccccggtcagtggcaaataggtaatgacaaggattttatcgctacacgtgccgcttacaaactgaaccttagcggaccgtctgtcagtattggcaccgcctgttcgtcatcactcaccgctattcactttgcctgcgaaagcctacgacgtggtgaatgtgacatggcattggcaggcgctgtagcactcgatccgcaacaggttggctttgtccatgtcagtggtggaattatgtctccagatggcctttgtcggccatttgacgctgcggccaacggtacagccagcggcagcggcggtgggatgatattactgaaacgtctgtccgctgctttgcaagatggcgataccatccatgcggtaattaaaggttctgctatcaataatgatggtgcacaaaaggtgagttacacagcaccaagtattgacggccaatcttcagtgatcaaagacgcgctgcgtaatgccggggtatcgcctgccagcatcagttatatcgaagcacacggtacggcgacttctttaggcgatccagtagaaatacgtgcgctgactcaggctttcctggaacaatctgatggtgaagtgctacctgtagggagctgcgcaataggttctgtgaaaggaaatataggacatattgatgctgctgccggtatagcgggggtaatcaaaaccgtgttggcgctgcgtcaccagactttgccaccaagtattcactatcatcaacccaatcctgcaatccccttcgaacagaccccgttttctgtgatcaatacagcatgcccgtggccgcagacaagtcagccacgtcgtgccggtgtaagttctttcggcattggcggcagtaatgcgcaccttattctggaagaagctccgcgccagcaagatgcccgtatattagatgacgagcgctggcatctgctgccaatttcagcgaaaacgccgcaaacgttgcttcagcaaggggaacgcttggcagtagcattgactaccggtaatgagctattagcggatattgccggaactttgcaacaaggacgcagcgctttcagtgagcgtgcttttgttgtgggaaaagatcgggagcaattaatcaatcaactacgccaactatcaccgcagacgattaatcgcaaacaacagcctcgtgcggtgatttttatgtttccgggacaaggcagtcagtctattgaaatggggcaatcgctctatctgcgtgatggtgtattccgccagcaatttgatcgctgtgccgaactgctacagccacacatcaaactggatatcaggcagttgatttatccgcaatcggagcgcgacaatgctatcagccggttaaatgctacacgttatacccaacctgcgctgttcactgttgagtatgcgctggcctgccagctacaagcttggggtattacaccgcaagcaatgattggtcatagcctcggtgaactggttgcggcctgtgtagggggtatgcttgaactggaagatacactggcattggtagcaaatcgagcggcaatcatgcagcgccagcccacaggagcaatgctggcggtacaggcatcatctgaacgtatggttgcgctggcaccggagtgtgaatttgcagcactcaacgggcccgcacagtgcgtgataactggcagccatgacaatattgcggtactggaagaacaatgcaacaaggcaggtatttcttgccagcgactaacgacatcacatgcatttcatagttcattgatggatgctgccgcacaacagatgcgggaattcagcgcaggcttcacgctacaatccagtaccattccgatgatatccaatatcagtggccgttggttcagtgaacaagatcgcgataattctggttattggggagatcatctgcgtcggccagtacgcttctatgacggtattcttacgttactgaaccattatgacaatccgatcctgcttgaagtcggtccagggcgtgcactgaccagtatgctgaaagatctacagcaaacaggccaagcccagatactaaccacgatgcgccatactcgccagcaaaaaccggatgaagaggtgctgctcaataccgttgggcagttatggcagcaaggagttgctatcgattgggctgcatttggtcattcacacaaattacatcgggttatgctgccagtgtaccctctccaacgacaacatctctggctggaacagcctgtcactacatcagccaccgtcatcagtacacagcggagaaaactaccgactttcacacggtcatcagataaagagggaatcacccggtttacttgtaagctagatgataatgtctggtttatcgatgaacatcgcatcttcgaagggcaaggtgtattgccgggtacaggttgcctggaattagtgcgtcgtgttttcaacgaattgcaacccggtggcacagctactttcagtgaagtttacttcccctcaccgttggtactatcgtcaggtgttgaacgtcagatacgcatcagtttgactgccattgataacagcctggcctttacgctggagtctcacgacgatggtaatgacatgtggcaactccatgcaaacggcaatgttactgccgtatgctctccaccagcagaaattgtttcaccttatgagttgcgtcggaatttgcagcttgaagaggttgcagaggcaccggagcgtttcaatcaagcatttgctgactatggaccacgctggcaatgcattgcaggtgtatggatgggggatcgctgtgcgctggcacagttgcgactcaatcaggcatttatcgatgatttgccggatattgcattacatccggctttgctcgacttgggcacggtgttcttacatgcctgtctgttgccgggtgatgcttcaataccgttccattacggttcgctgacgctgcaccaaccattatgcgccgaattttacagtctggcggttgaaacggcacctcggacttatgacataacgctatttagttgggatgagcgtcaaaattgcaaacaggtgctggctgaaatccacggttacaatttacgacagttcaattccttaccattccagccagccagcgagtcgaatgtagcacggtggtgtcgttaccctcgatggttaccgaagcctctaggcgaagcaaaacagaatcgtgcgccgtggttgatttttggtgcccaagccgctgagctaagtgatttatcgcaagcggcggcacccggtagtatcgttgttgaagatgctgatgaatttctgcaacagagtacctaccgctttagtttgcgtaaggaccagcccgaagattatcaacgactgatagattgcctgatacagcaacaagtgctaccagaacgtatcatctggtgctggactgcggcggggatttctcaaccagaggctgcatttgaacaactggcggctgcaattaaagcacttaccggtcatcacagagtttttaatattaccctgatttcccgcgggctacaggcagccaaagtgctagaagcctgtaatgccgcacccgcgcttggtttgctcggaatattggcggccgagtatccgggatgttctgcacgtcatatcgatctaaatgatgacacttttgctacatatcaatcgctgattgcggaactgtatacggatatgcaaccggaagagacgacagaaggaataccggttaccagcatttcgcttaaacagggtgaacgtgaattacagacatttactgagcttgatgagatacctcgtcggcaaattctgcgggatggcggtgtttacctgattacgggtggattggggggtatcggtcagttactggcacgtcacatcagcaatcaatgcagtaaggttaaactcggtattttgagccgccgaggaactaatgcggtaagtgaagctttactcgatgtgttacagaaatctggtgctgaagtcatgatgttacgcgctgatgttgctgatgatgcggcattgactaaagcactggcacagatgcgggcaagatttggtgctatcaacggtgtgattcattcagcgggtattgaagccagtggattgctggagcatggcacgtcgcaggactggcggcatgtgatggcagcaaaagtaagtggtacacagcaattgatgacggcgataagtcaggaccctctcgactttgttctgttgtgctcttcacttgcctcattggtaggtggaatgggtcaggcagactacgcggcggcgaaccgttatcttgatgccgtggcgcactattggcgacagcaggctataccggtaacgtcagttaactgggatacctgggcagaagtggggatggccgtggattatgctgcacgccgtcaagaaagcgtgatcggtctcagtaatcaagagggctgcgctattttcgatctggcgatcgctggaatggaagcacagatcgttgtcaataaatttccccctgttcagcgcacacaattacaggatttatcagtgatatctgattccgccagcccagaggaagcggttcgtcaattgtggtatgagctactgggcgaagagacgattcacttggaagatgatttcttcgaactgggcggtcattcactgttggcaacgcagatgatctcccgtttgcgtgatcatttccagcactgcctgacgctggcggagtttctcgaacaaccgacaatggcacgtgttgtccgttcactatctgacgagaaaaagagctcggttcctgagaatgcccatatccgctattgcctggtgccaattaatcacggcggtaacggtaattattcacccttcttttgtgtgccgggtatgggcggcaatgttacccaatttatgcccctagccggggcattaccaccagaactgccatttatcggtatgcagtatttggggcttgatggaaaaactgcgccgcaccaatcggtggaagagatagcaacacattatattgcctgtttgcgctcggctcaaaaacaggggccatatcatatcggcggtcattcattggggggcaaagtagcttatgaaatggcacggcagcttcatgctgagggagaaagcatcggttctctggtgctactcgactctgccgcaccaccctatgcaccggttccatatcaggaagatgctgatattgccaaagttattcttggtatttttgcctactacactaaccgactggagatgatcgacagcttggatgacaacgaaatgcgtgcattaccacgtgaggcgttactgagctatatcaaagagcagctaaaacgtttctcgttgattcaggcacagaatgatatgggctcaattaacggattgttcaatgtctatcgggctgcgtcggatatgtcaccgaaatatcgaccaatacccgtacagttgccaattcctatgctgttagtaaaagcggtagaccccctaccgaaaggggttgttgtaccggagatccgggagaccaatggctggggttgggaaaagttctccactcttcccattcgtatcgcagaagtgccggggaatcattatagctgcctgatggaagagcacgtagcacatgtatcgcgggcgataatccatcactttccatcaataataacaggaggacagatatgagtgattcttccccaacggttcaccttcctgaaaaccgccaacataaacgccgattggccgtgatcctaatgacattggctgtggatgctttgggtatcgggattgtactcccggttttacccgatctgttgcgggaggttgccccgcaaccaccggaagcgggtatgccgttaatcgggttatttgtctcactatatgcttttgcacagttccttttcgccccgttgttaggggcgcttagcgacgcttggggcaggcggccggtattgcttgcaaccctgtttggcacagcgctgagctatgcgctggtggcgacagcaccgtcactaggatggctggtagccggtatatttctttcaggctccaccgccgccagtacttccgcggcatcggcttacgtagcagatgtgacaccagaagcacagcgggccgcacgtttcggtctggtcagcggtgttcttggcttcggcatggttgccgggccagccttcggagggttattgggcatgattgcaccgcgccttccgtttgtgattgctggctcactggccgccgtgaacgctattgccgctatgttcgttctgaacgaaagtctgaccaaggagaaccggcgttcgttcgactggcaccgtgccaaccctttgggcagcctgaaactactggcgacggatggggtattaagacgactggtttatgcttcagctcttggcatggtggcttatggcatttttctggcctgttttgtcttactcaatgaaatgcgtttgggctggggaccacgtgaaaacgggctggctctcaccggactcggcgtcgggatcatcataacgcaaacttggttgctaaaaatgttcgtggcgcgttgtaacgaataccgcacagcgatcatcggttacggactctatacgttagcatttatcgcttatagcctggcggtatcaccactgattgttgctggtgcaattgctctgcatgcactggcgttgatcagcgattcaacgcttcgtgctttgatttcattgcgtgccggcaatgagcgacaaggggaatatctgggagcgcagaactgtatgttaggtctggctatcactgcttcacccctgttaggtgcattattactgcatttttcatctcgtcaggagcaatctctctattttcaaggaattccctttgttattgctgtcgttgtttgcctctgcgccatattgattttgctgcgtggttctcaggcagacatcacattacgcaatttatataaataaaaatatcaccagcctgtgaggattaattatgaaacaacatcaaggaagctattaccccctgaccgcagcacagcaggaaatttggctggctgaacaattaaatgtaagcacaggaatttataacactggttgttatattgatatttcaggtgctatcgatattgagacacttaacacggcgttgtcccaattgatagatgaagctgaatgtttacgagtagtcgttgtgcaacacccacaaggaccacaacaacagattgttaccaacctgcaatggaaatgcccacttattgatttatctcaccatgaagatgcgttaatagaagctgaaacctggatgaatgctgaattggtgcggccgatggcgttaaccctagggccgttgtttggtcttgcgctgctaaaaatcagtgatgaacactattttctgtttattcgtgtccatcatctggctagtgatgcttttggcactacgttgctgattcagcggcttgctgaactgtatacccagaaattgactggcgctgctgagctggaaaatcctttcggacctcttagcgatctgttggcttttgatgaagagtaccgtcgctcggaaaattttcaacatgaccgtcagtggtggtcacaatatatggtaggccgaagtgagccacagagccttgccgtgggagcgaagcccggtcagtttgccgacttgggttcgttcagttgcaccccgtgtgaaatcccggccaaggtcaaggatatcctgcgtactctgagtgaagagagtggaagtagtatggcacaaattattattgctatcgttgcttcctggatttctcgtatgaccgataagcaggatattactttaggtatgccagtcactgcgcgttcagggcgtgcgttacgtagtattccaggtatgatatcgaatgtattacctctacgcctgacaatagatcctgctcattccatcggtgacattagtaagctggtcagccaagaaatccgccagttactcaaacatcaacagtatcgttctgaagatatctatcgtgatttacagcgaaatggttctgctccccgcttgtttgcgcagaatatcaatgtgatgctgtttaacagcaatgtgagctttgcgggtaattttgggcgtaccaaaaatttgtccagtgggccggtagaagacctcactgtgaccatttatgatcatggcgaaggcgacagcttgcagtttacgctcgataccaatgataacctctacactccccacgatattaacctgcaaaaatctctttttcagcatttcatcactgaattgctggcggatatatcacgccccattggtgagctgacattgccagattggcacataggagacagcctattgcctgcacggcgcaccgtattaaatgaggaaacactgacctcgcgctttgaacaacgagcaattgccatgccggatagtgtggcgctgacttatcaacaggagaatattagttatacggtattgaaccaacgtgctaaccaactggcacactatctggtatcacggcaaataggcccagaacagcgtgttatggtctgtttaccacgttctattgagatgatggtgacactgctggctatcatcaaggctggtgctgcttacgtgccggtggaggcggattatccgcaaagtcgtcttgattttatgatcgacgatgctgaacctgcttgtgtgatcaccaccagtgaaattgcgcaacgcctgacagccaatatccccatgatattgctagatgatcccgaattgctcacctatctggaaatgcaaagtgttgctgatctgtctgacaaagagcgcttgcaaccgctgatttcagcacatcctgcttatatcatttacacctctggctccaccggtgtgcccaagggcgtggtagtgactcatcataatgtgatgcgtttgctacaaagtactcagcgctggtttaacttctctgaaactgattgttggacaatgtttcactcttatgcttttgattttgcggtctgggagtgttggggagcattattgaatggcggaagattggtgattgttccctgggaagtcagccgttcacctacagattttttgcagcttttagttagcgaaaaagtgacggtgttaaatcagacaccttcagcgtttcaggcgctgatccatgctgatcgcgaagcccctgaacttgggcagagtttggtactacgcacggtgatttttggcggagaagcactgaatgcgcatattctggaagagtggtatcaaagacacgatgataacgctcctcagttggtcaacatgtatggcattactgaaactactgtacatgtaacctatttccctctttcacgtgaagtcgttgctcagcctgcttcaagtcttattggtgaacctattgatgatctcggtatttatattcttgatgaggctcaacacccggttccggtaggtttcgtgggagagatatatgtaggcggcgcaggggtagcgcgtggttatctgaatcgtccagaacttactgctgaacgcttcatggctgatccctttatcggcacagatgcacacatgtatcgcacgggtgatctggcaagattgcgtcgggatggggtactggacttccttggccgtactgacgatcaagttaaaatccgcggtttccgtattgaattgggcgaggtggcggcagcgctaaatgcacaccctgatatcgtgcaatctgaggtcattgtgcgtgaagatgaaggtcaacagaagcggttggtaggttatgtcattgcccataaaggtattacgcttgaatcacagttaatacggtccagtctgaccacatgcttgcccgaagcgatgattccagcagcaatagtgcagcttgatcacttcccgttgaccattaacggaaagttagatcgtaaagcgttaccgaaacccatgtggaacagtgtagtaatcaatgaaagtagctcctccagcccacaagaactctcgctttgtcgtctgtttgccgagttgctgggattagaaaatatctctccagaggataatttctttgagctcggcggcgaatctttggttgcaatgcgggtaatagcaagagtgcgtagtgacttcggcgttgaaataacgttgcgcgatctatttaacgcaccgagggtcagccaactggtgcaacgattgaacgctttgcagcaggaaaatgaagtcgttagccagacctaaatttttaacgtgattatgctggcaaataaataaaacagaggaaaaaacataatgaaccgaatagatgaattaaccgcagaacttcttagctcaatgaatcagtatgaccttaaacggctggataatattttctctgaagatatttcactttattatccgggccttactccaatggtaggtaaaaagatgtcgattatttttctcaagaaacttttttcgaattttgaatatttacattttaggcaaacggggttcattgctagtaataaccaggcttgcgttatttgggaaaatgaaggacgccgtaaaaatagtgatacttatagcaatatgggcgtgacattaatagaaattatggacgacaaaatagttctcctcagcgattactttaaatttgaagtacctcattaagcaggatatcactgtaataaaagatttggtgctctctggatattgtatttaatttataccctatggatttcaagatgcatcgcggcggcaagggagcgaatccccgggagcatggcaaactatgtgaccggggtatgggcaagtgcagccaacaaagaggaaacttgaaagatgacgggtatataaccgtttcatgcaaagataaccacaactgttctatttcattccgccagagagaataagattaataccgttcaatactatcaatgatatttccggaaattgttaaccactaccgtatacctgtaatgcaatgtggtagaccaattttacatgcttactacacaccctaagtatgtagtaacaaatttatgaagttacataaagctaatattcggttattgccattgcaagactgtattcaatatctgccatctgaatttggcgtaatgtttcctgtttaggccggtaaggtaacagatattcctgacactgtggaaaagcaagacattgcggtatcgggcaaggagttgtggttttttcattaattatgctgacactatcaataatatccggccaataccgctgcatctttattcccccgacgattgcagtcggagccaacggaaataatagtgatatatttgtataattatcataaacatatgcattttcccactgatgtgtatcttcaagttgatattcattaagttttcggctttgtgcatgagttaataaattcaataaccaagggtgtacaccaggttgctgtctggcaagtgtctgcatcaataagatcaatatatccagtgggagataaagggttctggcggcaagagaaaaccccgataactgttcctgaaatgcctgcaaaataatatatgagagagccagattatcggcatattgcgctaattgtatgccatgcccaagaacagagggataatactgtttatctaataataaaggaggttgactggaaataatataatgttttttctttttattacgactgaatatagattgttttattaatactccttcctcattgagataccaccaagaataaggacgccagccaagatcactaaaatttgtgtgagtcagcacaacccggagatgaaaaatttcatggtcttccttctgtttgtcagtaacgaatttactgacaccagcccgtggaaaaaagatattaggactggcatggggtaaagtgacaaatattttttttgcacagagaaaacgtttcaatgttacctcattccaacctaataaagaccatatttgatgtgataatgtatccggcatggttggaaaaagcagagattttttattatttatctgtgaaataactaactaacgataaattatattattcatgtttttttattcctttataaggtaaatctcgctgagataaataccattgcaaagaaaataataataagataccaaccaccaagtaataagtagttttcagggaaaagagtgataataatgccccagcacctaatgaaaacgttatcttagacaatgaagcaatggatgttcttagcataataaatttgccgacatcctgtttttcaggcacctggttacatttcacctgaatacatataatgtgacaggtggtaaacagtattacacaaaataacaatgcagctaccagatatttattctctgctccagccattaatacaattatgattgcactgattaatagcgcatgattaagaataaatttttctccgactatttttcgcgacagaagtaacccagagataaaccccgctatcatacagctaatattgagtgacgcgtaaaaattcgcccccgattcagtaagaatatccgccagtggtggtaaagaggtattaataaattgcaatgcaccactggcaggaatcgaaaataataatacttttcttaattcctgtcggttaaatacatgaacgagatacgccttatccagtagttgtttctgttttttatcggtatgaactgttgttggtatcactgataaagtaaaagaagtaaaaaagccggttgctattgtactggcggcataaaaaaaaccagcaataaataagcctgaattaccagcatccaatgtgagaaatactcctcccaatgcagcacccgatgtttgcgaaatctgaatatttgctgccgaaatttgcaacattttactgccatcctccggcgtaaaattatcccggacaatacggttaaccgacgttttattgaacatcttcactagagataaaatgctttgtacagttacaactgccaacatgagtagtgtaggttgtgttgatgaaaataaaaaaaacagtggcaggcagagtgctgacagagtgaggatgccattactgacagtgagttgccggacagggtttttagtatcagcaaatgaaagaagaaaaaaccccataattgcggacggaagataccctgctattatcgtgagactgacagctaatggactatgtgtgatttggaaaaccaaccagagaataatcacactttgcatcccctcagctaaggcagaaaaagccgtataagtttggaaccctataaattttttccgcaataactgttgattcttcattgtacttctctcttaacatgcgttgatggggaagagtctgacaattgattaatcaaattatgaaattcagccagactttgacatgaggcgaatgccaaatagcgaaagtcgtgagcaccagtacgtgtcattttatggcgtgttttttctaattccgatacagcaacaacatttggtaaacgtaataaatctgatgctctgagcctctcgggataaacaccaataaccccagaataaccgtgataatcctgtgatggtatattattaattgggcgcagtaactggctgttaacaaaagcctgccataaatttactccagtaaaacgcagtagtgactcagcaacgccaactcctggtggccgtaggccaatttcaccaaaaattaatcgttcaccccgtctgtaaacttccatatgaaaaacaccttgttttaacgctaatttggtaatggctcgttgagccatagaataggctattgaaaacattggatgggatgaaggtaggtgaatacttgcccttgtttgacctctggcactgaggataggaaggctgtaacaagaaaggcaggctacagcgatctcagacaaattgacgataccgtcaagatggaattcttcttctatatctatttcttcctcaatcaacattaatgtatccagatgagtaagtttttgatacagctgatcgacggttagacgttcaacattctggcatgaagaactagacagcggcttaataataaaatgggtggctgctccttgggtacattgtgcaaaattgttgtagaaatgaccggaaagccaacaccttggggcaggtaattcatcttcaagacatttacgcatacgccatttattggttacacataacgcctgttcataatttaagcctggcaatccatagcgactacggagaaatccagcaaatgccatgttactctctgaacttgcaaccacataatgaaaaggcgtctgattcattatgttatctatttttgccagcgttttctcctgtgaagcaaagtacacctgcggttcagaaacacgaatataatcaatattctgatgttgattaatcgattgttctaacattattttgtgagtatccagaataagggctcgttcagacattatcattcccccgtaaacgcaataagtttattgacattttctactaatgtgtagtgatccttatgcgtgataatcgcgtagccagcacgaccataaataccttgagattgcatctgtgtatcttctgtccaatccagttcaaccaaatcaaaattctggtaaaaagactgttttgtcagtgaaacaccgtcaaaagcacgtaatagcacaacagcaaaaagctgagaaggatattcaagcaggtggtgttcataaggtagccccaaagaaagtgtggcatgagcactatatagatcgacaccatagctcagttttatcatttcaggtacccaggcaccagcaggtcttaaagcacattcactaaaaaataccccttccccatttttaaaaaattcaagatggaataccccattaacggcatctaaacgttccaaaatacgtggacaaaactgatcaatttgttggtaaatatctggaaaatctcgacgtgatagtatttgtaaagccagtgtttttccttcattacattgcatcaccggggtggcatattggctgatagagaaccaatgtaatttaccttcagaccaaatcccatcaacacaaaattcatcagcagtgatcttattttccgcaacgtaggccacattacttagatttttttcatactgttggaaataagtttcatactctgattctgagttgatagcagtagtagcaaaagaacccatgccattagctggttttatgatgaaaggggtacctaactcaacaaccaattgtgaataatcgtcatcacgggttacataccggcaataagcatgagggacaaggtgtgccagcttctgtttttgtaaaaatttatcccgaaaatataaagtattacgataatctttagggccaggtaattgcaacatatcgcgtaataccgccgccgtaaatacaccgtcttcgttgcctgtaacaatacctataactgtatgtaaggaaaagtttaatacacaccgaagaacttcttgtgcatcttctagatttttaactatatagtacctcgtgccattaagggcaggcttaactcttttcactatatgaataatctgatatccctgatgggctagagctgtcgcaataccttcacgatatcctaatacaataaccgtgttgttcattcattttctcctgatcgccagatatagagatcgtgttcgttggtattaaaagggcctaaatattcaaatcctcgttgagtaaagaaatgaatattcatcgccagtgaacgacgtaatgcaataataataggtaattgcgcctgctggactgcttcttggcaaatgatattgagtaatttgctggcaattccccggcacctgaatgccggtaatacagataaataactgaatgttaaattatcgtcctcttgctcaattaatacagccgcaacaacctgattatcatatttagcaattctccaataaattaacttctccataatactgacaggcgtttcattcagtgctgtcggcataaaatcagccacaaatggcagataaacgtcttgcaagagtaccaatattcccttgatatcttcctcagttggtatagagaagctgattgctatttctgacattattcatttccagaattaacctgcttaacaaccataaacagttggctttcatataaaattgccaaattcccctcaaattgatatttatccaccagcatttttaatctttcgataaataactcaccgtaggcagctaaagcacgttgcacttgagtcgatgaacgactcatcccgataaatgcttcgccgggaataagcatactccagcgggtattaagtgtaatatgaagggcattttcatgcaggaatgccgtattcaattccagcgcataatcaaaatcccgatagtgacggctatagttagggcttaattcttccagcagattttcatactcattcagaaattcactatgccggtaatctcggttattttgcaggatcgctatgatgccattatctgccagactgtttctgaccagatttaataccgttgcccgatccatccattgaaaagattgtgctgctatgatcaggtcaggattacccacattggcgagatgctgttcagcactgccatgtaaccaactgacccatggcagtttctgtttaccgatgtcgatcatatcctgcgagatatcaatggcagtgtagtggtgttgctgaccaagcagatttgctagtccttcgagagcaataccagttccggcaccaatatcgacaacagacagtgccttgtctttaggcagccagtggcaaatttcacggaaaagtgcttgcgggtaacgagggcggtagcgatcataacctttagccaaaccatcaaatttctctttatgctgtgtcatattatcctctgctccttctctttgggtgatgggtttttgggcaattgattaaaaatgtaattgagtcgtccacctgcgtggacaaccgccaacatttgttcggatggtggataaaaatccgctaatgacgtttcagcgataaaacggccttcgttaattaagcattcaacagctaatccttcacgaaaacctttaatgtcggcttcaatcgctaacaagccaagattccatgagttgcggaaaaaaatccgcccgaaagcgggagcaacaaccataggtatacctactgctaataaagtgctcaccgcctgttcccttgaactaccaataccaaaaataccattacagacaatgatatctccgagttgaagtgtggagacaaactcaggaaaccggttttcaaacagatgaggagccagttgagttggctcggtgtacatgtgtttataacgtgcaggaataatatcgtcggtagaaatatctcccgtaatcatcctgacgcgttgatttttgatgggattcctttttgcaaaatcgtttttttgatcaatcatgccattcaagctccgtaatcagcggcaccctgccatgtaatgccacatttgctgcaactaaaggcgatgagagataaatttccgcttcagcattgcccatacgcccttgaaaattccggttcatcgttgaaagaaccctttcccctttggcgggaatggtaccttgtgtgccaacacaagccccacacccaggaggagtcaccagagcacccgcagaaacaattttttcaatatagccacgtcgcatagcttccagatatacacgttttgaaccaggcgtaacgatacaatgaacatcctgatgtacgcggtgcttatcaaggattgccgctacttccgcaatgtcttctaatcggctgttggtacaactgccgataaagacataatctatcttctgccctgacagcgtttccagcggtaccgactgagcaggggaatgtggcagggagatatgaggcgtcagttctgacagcaaaaatgtcagatgatgatcaacgacctctggattgataggccgcatattggctggcctaccgggcccatccggcataaagacgcatttggcaccaagttcgacacccatactggcgaaactggcagcagaatctaaggaaagtgtctggctccattctccacatagctccactgaacgatataaaaagggggattgcccgaaatgtcgcaataaagcgagcatcacatctttagtccgtgtagccggatggggttgaccggaaatacttaaactgactgtttctggtactttcagccaagtctgcccagtcagcattgctgccaatacatctgaagctcccatgcctaaggccagtgactgtacggcaccccctgtacaagtatgagaatcagctccaattacaatgttaccaggttgaaaccactgctcttccaaggcaattaaatggctgataccttcacctctagcgaaaatattgacaccaatcgatttggcaaattccattgcttcattaacacgttcagccattaacctatcaggcacaatcactgaatggtcgaagaaaaaaccaattttttccgggcgcagaacccgtttcagattatgctggcgaaagagtttagcgatagtcggtgaattcccatcctgaacataaattctatcgacatcaacagtgatcagctccttagccataacccggggtttctggctgtgttcagcaataatctgattaacgataggctgttcatgaatcatcattctgatgttccttctgcctgctgatagagttcatgtaatacatgtgttgggatcccgccgggatattctccggcagcttttcgtaccagcgccagacaatattccaatgcctgtggatctgtctttatgctatcttcttctaacatattttgtaagatagcccgaccggaatgcttgccgacaaccagacgacgctgaccgccaacctgctcaggctcaaaaggttcaaatgttttgctatctttcagcattccattgacatgaataccggattcatgggcaaaaacattgtcaccaacaataggttgccaaggagaaattgtatatttactggcctgagcgactttctgagagaggcgggtaagttgtcgagtatcaacaccggtatctatctgatggaaatgttgcagagccattaccatctgggctaaatctggcatcccggctcattcccccatcgcattaacgcagacatggaaataacgagcccctgcttcaagacccgccagcgtattggctacagccagcccgaagtcattatggcagtgacactgcaaatcaatggctgatgcctgacgaacagcagaaacccgctgtgcatattgctggctattcagaatgcctatcgtgtctgaaagacgtagacggtcggcaccggcctgctcgacggtagccgcatattcttgcaagaaactgatttctgtccggccaacatcttcggcactgattgagacaaaagcacctttatctttagcaaatttgatcatatcgctggcggtcattaataaccaatatctgtctttgctcacactgtgtttaaggtgaatattggaagtcggaaggccgatatgtatcgccttaaatcccagagagaaagtatatttaatatcttccagtaccccccgattccagccgataatattcacttcattcttgcgttccagcatctcttctaatgccagaacttcatcccctttcatggcgggtatcccggcttctatccacttaacaccggcgtctaccaacgaattaaaaatactcacttttgtttcttttgaaaatgcaacaccaggagcctgctcaccatcgcgtaacgttgtatcttccagaataatattttgttgaatagtcatagcgtcaaaaccttattttttattaatgagtattatttaaacgtgaaatttactgggcggtttgggaatattcagcttctcccttaatgtccctgatttataacccattttgaacactcctcgtttttgtaattcaggtacaacatgagtcacaaactcctccagacatccgggcatataaggaggcataagattaaatccgtcacaggctttttcctgtagccactgcaccatttgttcagcaacttgttggtaagagccaatacaaattaaatggcctctggcaataatgattttttcgtataactgtttaatcgttaaagactctgatctggccattttttcaataatcgcccgacggctttgattcccattagaaacaggaagatctggcagaggttgattaatatcgtagcctgataaatcaataccaccgagcaaatcagataacatgctgagaccaaattcagggtgaataagcgcctgcaagtcgttaaatttctttttggcactctcttcatcagagccaataaaaaagcacagccccggcataattaaaatattgttatagtgcctttcatattgactgagtcgggattttaaatcgctgtaaaatgcttttgctaaattcatatcaggttgtgcagtgaaaactaattcagccgttctagctgccaattcttttcctggttctgaagaaccagcctgtacaataatggggtgcccctgaggaggatgggaaatattcaatggcccttttacggagaaatattgtccctgaaaatttaattcatggcattttgatggatcataaaaaataccactctgcttatcacgtggcagagcatcatcatcccagctatcccataatccagtcacaatgtcccaggattcagccgcctgatggtatcgttcatcatgctcaggatgttgagcaaagccgaagtttttcgctgcatgagatttagacgaggtcaccagattccagccagcgcgcccacggctaatatgatccaacgaagcaaattcacgggcaatattaaatggatgtttataggtggtggatgcggtagcaaccaaaccgatatgttcagtcaccattgccaatgctgataaaagagtcatgggttcgaatatgactacccggctaccataaccccgctgatcatcctgaaaaaccgaaggtgtatcagaaagaaaaattaaatcgaataaacctttttccgctatacgagccatattcagataatgcccgatatcttgtgcagcttgcggattaacatcagggtgacgccatgcagccgggtgatgcccagtaccataagtaagataagcaccaagcacgagttgtttctgatcactttccattatactatacctgtcatctttcaaattgcctcttttctggcagccttcgccgtttttataaacacacgattatctatgctcccgagaattcgctcttttgccaccacgatgcaactcgaaatccataggttatatatatgagaatatattttcttgatagaaaaatattaaaactcaagcatcaagatgcataaggaataagattgatgactttttttatacttatgcaatctttctctacttctgcggaacgtccatactttaatatttcgtgagatacatgttccattgctttataagccgctctgagcatatggttggcataaataataatattaaaacctgcttcgctcagatcatgatgataagttgctgaataagtcgttggtacacatatcagtggtaattttggatatttctttctgaatgactgactaaaatcaataacttcatcagacgtattctggcagctatggatcataatgccattagcacctgctttaacataggcattggctctctccaatgcatcttccattccgtaaccagcaattaaactttccagtcgtgcaaaaatcattaatcggctcttttgttgtgcagctttacctttagctattttgttactgaattctttaatatcagccaattcttgtttaacactggtgccaaacagggaattccttttattgcccgttttatcttcaataatgactgcatcaatacctacctgctccatttttctgacataatggacaaaatgctcaacccgtccacctgtgtcagcatccataataaccggcattttagtgagtaattttatctcatgaatattttgtaaacgactattaatatccaatgtttcgttatcaggaatacctttaacagctgagtcagttaaagccgacattccgcaccgcattcgtaatttgttgttttaattaagaattaataaatgaataaattttatacaaacgattttaaatcagtacattacagatatagctgcggaatgacagttaaagaacttgaccagataccatcaaatttatgggtacagccattatcatctgtataatttgtatttttgataatgagtgccgaaagcgggttatgtgcttcaataaaagtaagcgatttcttctctttgagtaacttcttcaacataaaacaacctcagtttaaaagccaatcagatcaagatgctatttcaaatagttcaatgagtattactgccaacactgcttgattataactctatctaaatgaaatttaggtgcccatgctctcgccctgaggacttatacaatgaattgaaaaatgaaaaaacaatagttaaatttatgtaaaatacctacttttagttaaccataaattaacatataaatgcgatttatccgtgataatcatcacaaaataaaacaggagttcagataatattaacctggaggtgatctacatcgttacaaacccagagtttatgcggttttcagccacataaacacaaatataaactgccgccagtttaaataagtgtaacgcttgtgagaaaaagatgagaggttactccaatgcttgtacaatcggaaacgtccaccatatagattaagaaatattgtaagctgccaatgttatgaatagaggtgaagctattctcataatcaaacaaaaatttgccccgcttaatccaatcgataataactattactcgtgctccattgcctgaaaggattatccatcaggtggcgaacgaaaactcgggagaacaaaattgtggtacatctgcgcacttttggaagcagatatcgttggacacatcacccaccgtctgacgatgaaagttatccggtttctttatgtagtgatatgatggacgctccctttttcagttgctgatcgtgtcatctttgacttgatactgaatatattgcatttcgggaggttcttatgaacacaaccaaagtggtgggcattgatctcgctaaaaatgttttccaggtctgtgtctggttaacggataactccgtcgcctggaacaaaaaagtctcacggcaaaaattgctggatacactctgggcgtttcctcccgatacacttattgcgatggagggcctgtcagagtgctcattactggggaagaacgctacaagccatgggctatgaaatcaggcttatcccgacgcagcatgtcaaggcactctgtaaaaatcagaaaaatgatgccaatgatgcgctggctatctgtgaaaccgcctgtcgtcccggtatccactttgtgctggtcaaaacccttgaacaacaggatatcaaagcactatgcagtgcccgacaacttaaggtggaacaacgtaccgcactggttaatcaaatccgggcgttgcccgccgagcaagggatcgttatccctgcgagcatccagcaactccggcaggctttacctgatattttggaagagggaaaccattcattatcctttgtcctccgccgtctgctccattcgctacaggaagatatgcggcgatttgatgcccgtattcacgaaatagataaagaaattcagacggtatcaaaccagcaatcaagttactcccacttactaaccattcccggtgtggtgccattgattgccgcggcttttatcagtgaagttaatgcagaacaattctcgcatggccgacagctctcggcctagtgtggtctggttccacgccaatacagttctggggggaaaagccgcctgtcaggcatgaccaaacagggtaaccgtcacctgcgaacgttaatcattcatggtgcccgtgcggtgatgcgctgttgtcaaaaacgcgatgatggcttaggtgagggtgaccatctcattaactaccggctttagccggtcagctttagctgcgatactgtgttgtaccggaggtgcaacatggattacagatatggcagccacacggtatttcagattgaataccattttgtgtgggtaacgaaatacagatacaaagtgctgacaggagaagtggcaagtcgagtgcgagaattaatccgtcagacattcagctcctttgaaatcagaatattaaagggagttgtgagtcaagatcacgtgcatatactcgtcagcagtcccccaacattagcgccaaatgaaatcatgagaaggctgaagggaagaacggccagtaagctgtttgaagaattttcgcatttgaaaaagcggtactggggccaacatttttgggggcgaggctatttttgtgcaacggtggggcagttaacggaggaaatgatcaaaagctatttagaacatcattttgaacccaatccgaatgataatttcaggatggataattgacgcgtcgtttagccgacgcgtatccggactttcagtccattaatcactaacccacctactttagtaggtggttgtttattcagaaacctaagctatccagtagatcatcaacctgagcctgattagcaataacacccacgccattttgattcacctgcggaccatttagcaaactgtcagcttctttcttggtttttatcacctgatcagccggcatgttttccattaataccatcaccaactgtttttctatttcctgaataacatccatcatccgcttgataacctgaccggtaagatcctgaaagtcttgcgccatcatgatctccagcaattgagcgttagtgaaagcagtatgttcaggtaccgtattgaggtaattccgggtatctataaccaacgagcgagccacaggcatctcaactgggttttcaaaccactcatcccaacgctttttcagtgatattgccgatgactctaactcattctgacgaggttgcgccgcttcaacgcaattaagcgccctttccgccgcctgcgctgtcatctgcacaacatagtccaaacgttcccttgcatcaggtattgcctcagccgcctgagcaatagttttatccaatcccaactcacgtaaactatcacgcaacatgcgcgtaagctggccgatacggctgataatttcactggcgctaatggtctcatcccttggcatgactggatttacactcattatgtctccttagaggcccagtttttcaaatattttgttgagcttttcttccagagtagctgcggtaaaaggtttaacgacataaccactggccccggcttgcgcagcagcaatgatattttctttcttcgcttctgcggtcaccatcaaaaccggtatcttggccaattgggcatcttcacgaatgatttttagtaactctaaaccatccatattgggcatattccaatcagagataataaaatcaaattgagatgcacgaatcttagccaaagcttctgccccatcctgagcttcttctacattattaaagcctaattcttttaaaaggttacgaacaatgcgacgcatggttgaaaaatcatcaaccaccaaaaatctcagatccttattcgccataaaaactccttgaaattagttaccagtcagcacagagccgcttaaaaaatattaaatttatacccgttatctttcaaattgcctctttgttggctgcactcgctcaccccggtcacatagtttgctatgctcccggggattcactcccttgccgtcgcgatgcatcttgaaatctttagtgtatacccgttatctttcaagttgcctctttgttggctgcactcgctcaccccagtcacatagtttgctatgctcccggggattcactcccttgccgtcgcgatgcatcttgaaatctttagtgtatatccgacagccgttaaatacggacagcttgccccgagcttatttttgccagcattctcttgctcattttgagtatatccatgacctcgtccaccgcccccatttgtattgccgctcttggcataccaaataccacacaacttgcttcatcctgagccaacgtgtacgctcccgcttgcttcatctccagtaaacccgctgcgccatcactgcccatgccggttagtaacactccaacagcattcttcccggcaaatttagccactgatcgaaacaacacatctacagatggacgatgacgattaacagccggtgcatcggtgatcagaacctgataatcagcaccattgcgacatagttccatatggcgatcacccggagcaatgtaagcatgccccggcaaaatccgttcaccattttcagcctctttcacggtaatttggctaagtttattcagtcgttcagcaaaagaacgggtaaaaccaggtggcatatgttgagtaataaggagtgccgggctagtgacaggtaacggttgcaataaattctttattgcttccgttcctccagtagaagcgcctactgctatcagtttttcactggataacaaaggcttaaaacttaaaggagcagaacttaccggtgtgattattggcacagataatttagcctgtgctgctgtccgtattttctccgcaataagttcactgtaagccagcatgccttcacgaatacccaattgaggtttggttataaaatcaacagcaccaagttccaatgcccttaatgtgatttcagagcctttggctgtcagagaagagatcataaccaccggcattggccgtaagcgcattaatttttccagaaaatcaataccatccatgcgtggcatttcaacatccagtgtgagcacttgtggattatgctttttaatgagatcacgtgctaccagtggatctggcgcacaagccactacctccatatccgagtgactattgatgatctctcgcatgatttgacgcataagcgctgaatcatcgacacaaagaacagttattttattcatgacctctccttgcccggcctacaccgtaaacggtctgtcctagcaagtagaattcccggcttatttgagtgacattttcagaatgccctgcaaagagcaatccatcaggttttaacaaagcaacaaaatggcgcagtatccgttcctgcgtctttttatcaaaataaatcataacattacggcaaaagatggcatcaaacttctcttcaaacggccaattgggatctaacaggtttagatgctggaatgtcaccatgtcagcaagttgcggccggacacgagcataaccctcataagatccaatccctttaaaaaagtaacgttttctctgttgatcggtcaggtgacgcaattcatccagtcgataaacccctttgcgtgctttttccaatacatgggtatcaatatcactggcaataatttttgcccggtgaaaacgctcccctaagacatcacttagtgtcattgcaatcgaataggactcttctcctgtcgatgctgctgcactccatacccggtacgatccattcttcttacttgcatgtttagctaacagaggaaaatgatgcgcttccctgaaaaacgccgtcaggttagttgtcaatgcattgataaattcctgccactcctcactattcagatcattttcaagaatgaacaggtattgcccaaaatcacgtatttcgagggtacgcaaacgccgaattaaacggttgtaaaccatctcccgtttatgtgcagctagcacaatacccgcacgttgatatatgagctggcagatgcgctcaaaatgcgcatctgacatggtataacgctgaatcatgtgatgcagtggcgaagatggcaaacttgtcactgaagcaattaaatttgatttcatctggcctcagtgagtctgattgactgccccttcgctatccgcagacctcagcgtcagtgaaagttcattttcaagcttattttctgaattattgggtaactcaaattgtgccactatttgcaccaaaatatcggcctgatcttcaagtgccgccgccgccgccgctgactgttcaaccaatgccgcattctgctgagtaacctgatccatctgtgtaaccgcttgtgctacttgatgaattccccgactttgttcatcagatgccgcagcaatttcagccatcagatccgtgacttggtttacagaaacgaccaattcattcatggtcttccctgcatgactaaccaactcggaaccttggcttacccgctgaacagattcactaattaatgtcttaatctctttcgctgcttcggcacttcgctgagcaagatccctcacttcaccagcaacaacggagaaacctcggccttgttcacctgcccgtgcagcttctactgccgcattcagtgccaaaatgttggtctgaaatgcaataccatcaatgacgctgataatggcactgattttctgtgagctattggcaattgcatccattgtttccacaacatcaacggtcagttcgcctcctttagaggctgttttcgatgcagataccgccaattcactggcctggcgagcattttccgcattctgacgcacagttgcagtcagttgttccatactggctgccgtttcttccagtgatgcagcttgctcttcagtgcgggaagagagatcggtattaccctgagtaatttcctgaataccgttatacatcaagttagtattctcttttaccaacgtaatggaattaaccagtgaacgttgcatttcacgtaatttgaggaacacttcaccaatttcatcttgagtgaaaacagaaacttctttattgagttttccttccgcaacattctggaagtgactacgcatattggcaaaaggtctgagaagattctttttcaaccaccaatgagccgcccaagcaacaaccagtaccattaagatcgcacctacaaacatggcaactgaaatttggtaataaagacgaccatcttgaacggcggttgtaatcacctcaccgatatattgcatataatgattgaaatcagattcaagttgctgctgatacttttctgtcggctgatctaagaatgcatcataattaccactttctaaaaaagccgagagttctctaagcgcgttgatatattccttataactggtttctaccgaggccagcaatacactactaccatcctcgtcattcaatttaggcagcgcaataaactcagcaaaatgcatctcagccctatctaaggtttccttaacattagcaaccatactgccaatatgatcctcagattgttgtaacgttttccctacagcgattcgattaagtgtattacgcgattgcagcagagctgcccagctcaaccctaaggtatccctcttctgtgttcccagatcaatctgctcaatataagattgatctgcgtgaatgattccaagtgataaaccacttgagattatctgcattacacaaaacatcatcagtaacagatataaactggttgatatacgaagcctgcctaacatgtaatcacctctgttaacggctgcatgtgcagccgtagttatcgcttagtgttttaaaatgtttcccaattagcttgttcttccacattgttggctttcttcaacaccagtggattcgattttgcaggaggagtcttagccacaggcaaatgctcaattttcatttcggattgagatttatcgtcaagattcggtaattggaacaaagaaactagtttcttcaatccagcagcttgatcttccagtgcagccgccgcagccgcggattgctcaactaaagcagcattttgttgtgttacacgatccatttcggagatagccaggccaacctgagttatccctctactttgttcatcagatgcagatgcaatttcacccataatgtcagtgacacgggtgactgaactaacaatgttattcattgtttcaccggcgctctcaaccaagacagaaccggtatctgcgcggcttactgaatcttctattaatgctttgatctcttttgctgcctcagcactacgctgtgcaaggttacgtacttctcctgccacaacagcaaaacctcgcccatgttcaccagcacgtgctgcttccactgcggcattcagtgccaaaatgttagtctggaacgcaatagcatcaataacactagtaatatcggaaatcttctgagaactaccggcaatttcacgcattgtctgtacaacattcgccacgactttcccaccctggcgtgcaacttcagaagcactatcagctaagttacttgcctgacgagcattttccgcattttggcgtacagttgctgtcaattgctccatactggcggcggtttcttccaaagaagcaacctgttcctcagtgcgagaagaaagatcattatttccagcagcaatttcactggttccgttataaatactttcactgctttgacgaacactactgacagtagtgataaattctttttgcatatgcttcaggccaacagccaacgtactcatctcatttctgcctgaaacagttacattttgtgtcaaatcaccggtagaaagtgccttaatattctccaataatttgtttaacggattcagcaaactatgcttaatgctaacccaactaaaaatcatggctgaaaccagaatcagcatgataatacccaacataatcaccgcatttctgtaagagatactggcatcaaataccacatcagaatagagatgatcgttttgggtcaaatagaagttatattcttcctcaaaagcgctctgatatttgcccgttggttggttgaaaaactctaccgcccgatcatgttcaagcagaacaataagttcatgaagcgctgaaatataaacatcataggcttttttaaggcgattaagactttctgattcatgaataggcaatttagcggtctgttcgtattgttcaaaacgctgctctgcgatagagaggttacttctggcatctgtcagtaactgctccagtgtgtagtaattatcgactccctcatcttttttcatcatgtaacgaatgcccgcacggttcaagttgttacgggcctgtaacaaattaacccaagtgtcattcaaaaatgtctgctgttcccgcattttatccagtatttctagattttccttgttacttttcaactcatggaagaaaagtcctccggatataaattgcagagcaccaaataatatgatgaccgccatcagtccggtcactattttcattcggttaaacatgttttccctttttacaatagatcagcatggctctgttatcggcatcatcaaaggaaactttactggtcgtataaaagaaatttgaatattttttctgatgaaattaacgagggatagacaaaaagtagctgccatctgtcgatgtcgatgtcgatgatggcagtgatatttaatgattaacttttggctactgaatctaccagagccatctcttcactgttaagcagcttctcaatatccaccaaaatcagcatgcgatcatcaagtgaacccaatcctgttagatattcggtagataatgttactgcaaattcaggtgccggacagatttgctcagctttgagcgataaaacatccgaaacaccatcaacgacaatacccaccacccggtttaacagattcaaaacaataacaacggtattatcattataggtaaccgtttcctgagcaaatttaattctcaggtcaataataggcacaataacgccacgcagattggttatccctttaatgaatgctggcgtatttgcaatacgggtaacctgatcatagccccgaatctcctgtactttcagtatttcgataccatactcttcatcacctagggtaaaaactaaatatccttccccggcagtttctcctgacaatttattaaacgcttctatggccgacatgatcttaccttttactatgagattgacgattttccatggggattcctccccattcagtgcttattttttgctaataactcagctttgttgagtgccaattggtcatgattgagttgctgcaaggcagaaatatcaataatcaacgccacactgccatctcccataattgtggcagcggagatcccgggtaccttgcgatagttactttcgatatttttcacaaccacctgatgctgcccaactaattgatcaaccagcaaggcataacgacgacccgcactttgtacaatcacaataatccctttcgtcggatctgtttttgcatcaggaatatcaaaaactcgatataacttaatgagtggcaagtattctcctctgacatgcaataatttttcatctcccgccaagggataaatatcttcttcctgcggttgaagagaacttactactgcactcaacggcaaaataaacacttcgtcattcactttcactgacatcccatcaaggattgccagtgtcagaggtaacaaaatccgcgtcactgtccctttacctgcctggaagttaatctggatttgccctcccatttcctgaatatttcgcttaaccacgtccattcctacaccgcggccagatacatctgttacaacttcagccgtggaaaaacccggtgcgaaaatcaacatcgcaacctcttcgttactcatgttttcactgactgataacccttgtgatatcgctttggccagaatcttttcacggttcaacccggcaccatcatccacaacttcaatacagatattcccgccctgatgttcagcagaaagtgtcaagttgcccatttcaggtttgcccacagcaagccgagcttctggctcttcaataccatgatccagactgttacggactagatgagttagcggatcaataatgcgctcgattaaactcttatccaattcagtggaactgccaaccaaagttagatccacttttttattcagcttgctagcaagatccctgactaaacgcgggtaacggctgaacacatattccattggcatcatacggatagacatcacagattcttgcaaatctctggaatttctctgtaactgaaccatgcaatttagcaaatcgccatgcaaagtcggctcaagagcgttacagtgctgagccaacatagattgggtaataaccaattcaccaaccaggtttatcagttgatcaaccttctcaaccgcaacccgaatactggaagattctgcccgttgacgtggcgatcccgccggtggtatcggcgcaggacgcccggcaggcggtgtggaacctttttccggtgcagttgttttaacggctttagctgtatctgtatctttatttttaactttgtctttgggttcagctaccggcaagaaagtgatctgttccggttcaataacaaaacagagaactgccgtgatatcatcctctgtggctgatgttaccaatgatgcttcaacactatcccgagtctgttcagcatcataaacctcccccagattactcagctcatcaagcatcagagaaacttcacgctctttcagaccagaaagatgaacccgaactctaccttgctgattttcagtcgcaacaggctccgattttaattctggctcagattcaggcacctctggcatcaccgcatctgtggcagactcaaccccgccttcattctctctctgtacttccaatgcaagctggcgcaaagtctcacagatgtaggtaaacgcactttcatccggctcctgagaacttttataggcatccaactgttgctgcataatatctttcgcttctaaaaacaggttgataatatcagtcgtcagactcatttcatctcgtctggcactgtccagcaaattttctagaacatgtgtggtttgctgtagtttgataaaaccaaaagtcgcagcgccaccttttattgagtgagcactacgaaaaatagcattcaattgctcctgatctggcgcatcaggatcgagctgcaatagatgctgctccatatcctccagcaattcgtctgcttcatcaaaaaaggtctgataaaacgcggtaatatccatcgttactttgtcaccttggtcggtacacgattaggctcagcactctgcgacgctggtgctggctgggccaatactgtgatttcattggactgctgtgttggcctactttcagccgaatcctttccaatcacctcgtgaatttccttactatcattaataatcaaggagtcgctgccggtgttttgctgttcaatccgctcttccgcttgtttattgagcactaagatactgatacgacggttaaccggtgcactggcatcttcctgtttcaaacgaaccgttgaagccatgccaactacccgcaatatctttacttcatccagcccacctatcaacagctctctccttgatgcattcgcccgatctgcggagagttcccagttactgtaaccacgctcaccattagcatatttcaagtcatcagtatgaccggataggctaattttattgggaatatcgttcaagatgggtgcaatagcccgcaaaatgtcactcatgtaactttcaacttttgcactgccaaccataaacattggccggttttcccggtcaataatctggatacgtaacccttcatccatcatgtcaatcaacagatgtggacgtaatgctttaaggcgaggatccgtaatgatcaattgatcaagttgctcacgcagcctatttaacttgcgagcctcatcattagcttcaacgacttcaacctgacgcagaatatcgccttcctgatgaagcacatcttcccctcctcctggaataggattcgagctatcactgctacgctcccctttattaattgcaacttgtaacggggtacggaaatattctgcaattcgggtcaattcttgtgggctggaaattgccaacagccacataaccagaaaaaatgccatcatggcagtcataaaatcagcataagcaattttccatgaaccaccatgatgtttgatgccattccttttacgtctttttaccctaatgactgagacgttacgcgttttcatacctgttcttcagtttcttgctgaacaggtgcttttacccggcgaacatgttcttccaattcagtgaaagaagggcgatctgtgaggtagagtgttttacgaccgaattcaaccgcaatttgtggagcataaccattcaggctggacaataatgtcactttaatgcattgcatcattttaagatgttcaccgctgcgctgacgtagcaatgttgccaatggcgagataaaaccatatgccagcaaaataccgaggaatgtcccaaccattgcatgagcaatcagcacgccaagttctcctgccgggcgatctgccgaccccaaagcattaacaacccccataacagcagcgacaataccaaaagcaggaagagaatctccaaccatcatcaagctggttgccggaatctcgctctcctgctcataagtttcgatttcttcatccatcaaagcttcaatttcatggggattcatattgccactcacaatcaatcgcatgtagtcagtgataaaatccatcaaatgcttatccttaagcaaacgcggatactgggtgaaaatatcactctgctgaggatgttcgatatctcgctctaatgctaagacaccatgcatgcgggattttgctaacaaccgaaaaagcaacgccatcagatccatatacatcaccttgttatatttagatctacgcatgacctttggcaaaacacgtaatgttgccttaatcgcttttccgttgttaccaacaatgaaagcaccgataccagcaccagtgataattaaaaattcagcgggttgataaagtgcgcctaaatgaccacctacaatcaggtaaccaccgattaccgcaccaaaaactacgatatatcctaaaagtactaacacgcgatatcctttagctaagctggtgagcggatgggaagttgagcagtttgaatccagaatggttgtgatttcaatacaggttacaggaggaaaaagtaaaatctgtaacctgtaggaataattttcccatttaaattcacactgcgtgctgagcaagtccatccagcagttgtgaattagtatcggcagactctgaggaaagtttacgtttttttactgcacgtgatggcggttggcaaaggctacaaacaaagctattcacaggttgatgagcatgagtaataaaagttccaccacaagtccgacattgtgaaggttgcaacatgccactgtccacaaaacgtaccaacgtccaggcacgagtcaacgccaaaaccggtgcatccccttcagcaggaggacattgttcaagatagagtcgatacgctttaacaacagcctctacaccttcacaataaccactcttgagtaaaaaacgataggcattatagaacatcgatgaatgaatattctgttcccacgtcataaaccaatctgttgaaaaaggcagcatccccttgggcggaggactccctctcaattctttataaagcttaattagtcgccctctgctcaattgtgtttcactttcaagcatttgtaaccgtgcccccaaagtgatgagttccatcgccaattgtatatccttagcttcttgaactatacttttctcggccatctcttatgctctttttttcactgacgtatcgtcttttttcgaaaataacttctgaaacaaatgagtcgataacaaaatgcctgtatgtatttgttgtaaatcatccactcgagattccctagtaagctgctgaatagtttcactctcttcgaaccggaaattacagactaattgattagtctcagcgagcttgaccaactgaggtaatgtcaattcagacaacgtatcagccatagaatcgctaatacctaaacggaacatcgctgacgctttttcatggttaattaatcgctgagctaaaagcaaatacgataaatttatgtcataaatatgtttgagcaattcaaccgtactcatttctctatcccgtccgattacattaaaaaatcagttaagtgttcgaaaaaccactcgtgacaaaattcctaaaatagcttagggattaataatctcttacataactaaaatatacaggcttagtcagagcagtaaccatcctttgtattacttttgattcatccaacttcaaaaatattacggtagtgagatgcaaaagtattattgcgttacctgatataacatttttcattggcgattaagaatattcttaatgcagaacaactttactcctgaatcatcaacttatacaacggaaagagggcgcaattttaaatactatgtgacataactcacaaaaacaagggcttttaatatgcatttaatcgatgaattgctcattaactattcaaacaattaaataaaatccgaattctcaattttaataagttaaattatctaaataaaaatattagatatattttttgattttatacgatctattaaacttataaatttaaaataacgataaaaaatcctatcttgagtcaaactagcactaaaaaagacagttttatccctgagtaataagtgtaaacaataatcttattctgagatccggcatctccacttgtacgataaaacagattgagtttatgtaaaatttagttgcaaaaaagatactggtatgatcacttttcgtttagatttgtgctttttttaagcaaaaggcttaactaaaaatgcataccaccatgcaaagataacactaaccatacaaaaatagcataaaatacagtaagataatgaataaaaaaacaactataacaacattttattgattgcataacaatcaatatccagcctagagatagccagaaaaatcggtctatttcgactcctgacaacccaaaccgcagcaaaattaattagaaaaacttatcaaaaattgtatctcatgatataataatacgcaaaacccctctatcaactactttatctttttcatctttagtcttcatacttcaaattaatcattaattaaattcacacatgttcaatatatatatttcaaatacattaataattttaaactaattaaatatgatttattatcctcacaatctacatttaaagttctataagagatacaattccagaaataaaattcccaaactacataaatatataaccctattaaatatctatcataaattaaattaccaccctttatataatataaaaaatgaataatacacacattaatatttaaataaaaaatacacgatatttccgaattcatattcttatgatacaaatcaagtgaaatattaaaagtcattttttccatttttcattatttcatgtgatatttacgattatcatcccaaaaacattatttatacgtataaaaaacatagctaatgatgtcattaatatatatcattaacgtcattttcttaaatgataagaatagataaaataattaactctacaggaacaaaataattaattgagatttaccgtataaataattaatagaaatagagataaaaatcaatatcatttcccaccagaataatgaaattaataatcattggtgatataaatatcctgatatccataaaaaagatgaaaaaaatagggttttgataagaaatttactttcccatataaataatagtgataattttccaagtaattataactcttcatcaaacatgacagttaatgcaacaaccgattacaacctaacctaatcacagaaacactctcagaacgaagacactaaacccaatagttcatcaaacaagaagagaatatggctatcgagaatcattatcaattatgtaatcaataacactggaaatgtatctgttttttggataaaacacatcctttatatgcacaatatataagcacaatatataagcaaaagatatctgaaaaaataacaattcaatacactaatctggctaaaataaaacctgacgaacgaaatttttcactaaaaaattatcaatatcaacatatatatctataaaatcaaaatgaagtaaactagctctgccagtaccacagaatattcaacatttttgatacctcatttataatgatcttctcaggaactgtttaatccattttatctcaatgtaaaaaaccaagaaatatcacacatcagatcttgtactagtaaatgaatattttgcgccaaaaagaatggaataaaggctctggtaatcaacattgaaaaaacattgcaaagttcaaacttgccgttatattcaagcacttgataatacttccactcgcctctcttctcttaacggcccttcatttgacacccctaaattcttatcaagcctagtaatatctatcgctttttttgcactatctgtacctttactagcaaaaacgcctacactagcgtatctcaataccacagcaccattaatgttatcatcaagaaaccaactgtatgcccattcttttgcaatacaagatttttacgatgcacagtttgctaaataccaatctgatttcatttctcaagatttcagtcaccatcaactctgtttgttagaatgctaaaataactttgaattctaaccctacatcatggcaaatcctgacagtaatagcagaattatcctcggtaagaactcctgctgctgtgttactctttcttaatacagaaataacagggaccacactcccctccacgggatcaaggaaagttagcaactcctgtaatatcatcacgctttcatcaccataaagatgacaaacgtttttactttatcatcggataaatatcgaactgttaaattaatactctaagatcttgtctgatggtaaccatcagctacttccattattttttcacgacattctccatcaagcagaattattatctattttactcttatataagaacaaacttagatcacttcttctacttaccctttgaaaataattgatattttcactgaaaattctgagcaataatgagcggctgatggagaaccaaattaaatatcaactcatcaatttttctgtacccgcgtatgataccgatatcaggtttaccacgactaaattctgatatgagaatagcaatgttcaacagtcaatccagtgacaaaaccaaggctaaaaataccgcattgaacgacttttacctagagaagctattaatcaacaataccatccgaaactattgctagcataaagcaaatttgtaatcaacttggtttacgactaaatgtcagatgaaatctacatcaactatagatttaattgtaacaacagtaactatttgaccagtaccatttcgcatatctgcctcaaatatacctatggatttcaaagatgcatcgcgacggcaagggagcatagcgaactatgtgaccaggggtgagtgagtacagccaacaaagaggcaacttgaaagataacaggtatagcagcaagaacatcctctctcttggtacaagatattcgatcagtcattcttagtaccaagatctgcaaaactacaacacagtactgttaccaccgttctaatcacaagcttcaccgctttgtttataatttatccccttgccagaatcaccaacatatcaataaaagcgttacaggcgaaatattcaccttaattattcggaaaaatagtgctaaataactgcttaattaacgttgcctaaccgaggaaacacaccataggcaacgttttgtttgtttcttatgacgaaacaccattcgtcaatggtgattccttatcaaactagtgattgctgttttacacaaaagattttcagatcggtagttcagaagccattttccagtttattgagctaacgctcttttccagacttatacgacaaacaattgcttctatctctttttgctcatccagtgttgctaacacttcaacgcacacttcaaattttccaggttgaactttatcagcgaaactcaatgattttaacctcactgctactccattgagcgcctgtaatactaacgttctcaccagaatttcgtcatcactgtcacacactacgtgaattttataacactgtacttgatcaatggcctgctgcctgggttgtaaattaatacgttgagctgcttcacgtaacaatatatttgcgcaaagaataatggcagttgctatcgcagctagccaatattggccaaggccacacagcacaccaattccagcagaacaccataaggttgctgcggtatttaatccacgaatgttcataccttcccgcataatgacacccgcaccaaggaaaccaatgcctgaaacaacttgtgcagcaatacgacccgcactatcgggtgaagttgttattgaactaaggataaaaactgctgcaccagtcgcaactaatgcattggttcttaaacctgccatacgttgacgccattggcgctcagcaccaattaatgcaccaaagcacatagccgataataaatgaaagacaaaaggagttattaacatgacattctccatacaaccaaatggataaataatcatgtgcatttattttgcacacagaaacgtatgctgaatgtttaattcagccctattttctgtctataccaggaggtaacaaagcgtaaatatataacagcataataaaaacccaatatactatcccgactacttgactaactgcctatctcaataggctctaagtatcggataacaccattctttgagtaagtacagctcagatattttgagtggtactgcccgctttatttggcaagcagcagatcggaaggaaataaatagcttgccgttttattgtctatttaactgaaaactttgactatccaatgactatctctccaataaaatttgtacgaagtataatcaggagtaactaataagtaaagaaagatatggctttagcaaagaaaaagcccgtcattatagaaaatagtgacgggcttcaaaatcatccaagcaatcagatagccattacgtttgctgcagctggacctttcgcaccattttcaatggtgaattctacgttctggccttctgccaaagttttgaaaccgttaccctgaatggcagagaagtgaacgaatacgtctttgctaccgtcagctggggtgatgaaaccgaagcctttagactcgttgaaccacttcacttgacctttcattttgtcagacattgtgactttcctatatatcaaaaaaattttgccaccattgggcatgtattggccagttatatcagctattacttatggaggcactaagaaggaaacgcgtcaacaaaggctatctggggataacacttacacataactcattaactcaagatgtcgtacataaagtaggtctgtttatcaggccggctgcattaactcatgatagaaaaggaatagcaacctttttatgcataggtgttttaaaaaaaatatttatgctcattattaaagcaataattaacaaacaatgccattagttataaatttttttgatttattcaacctttatcttaatgaaagcattagagttaatcttagtcaataacaattggctgattaaaataaaacaactgatctacgtaagattacctcccccatgctaaccttaagaacaatatatttatgaaaatatttcacttttcctttgcttaatcaggtcaatatatgaatatcattaaacagatactgattcaggatcttgaacgaatcaacatcgaagaacaacgtgatggtaaaccccgttttaacagccaattcatcagtaaccatccttatctctgcctggctatgcttgtatcctatctgtttctcgctgcacttatctggtacgccccctattttagtttactttcactgctagcttttacagtactcttcattattatgtcggcggttttattactcgaaatcaaacctgtgtatcggtttgatgatatcggcgtacttgatctacgggtatgttacaacggcgaatggttcgtcagcgaaaaaatctcagactgtgcaatcaaagagctttgttcccaccctcatgttccattgacaataaaagatgaaatcaagcgcattatacaaatgaaaggtgaaattcatttttatgatgtttatatcatggcatttcctgaacaatcacatatagcaacatcgttaccgatgatgcatagccgataatgaacaaaagtactcaatttcagtaaaatagcatagttataagacaatgcgctcatatggcaagcaaataacaaactagtaagcttttttgcgttgacagcttttcaattgatcgctaatattcgccccgttctcaagaacgattcctccatagttcagtcggtagaacggcggactgttaatccgtatgtcactggttcaagtccagttggaggagccaaattcaagcctggagatgctaaagagaatctctaggacgcatgaaataaccagtatacaaaaatatggctagcatgcagaaaagcccaattcttattgggcttttttctatgtaagcaacagcacatttgccagcaccaaaataatcagtccagaactaccttataaaccttctctttagatttatgcaatacattcacttcaccaacaaatgatatttcgtagtgaatttttacctgaccattacctatataattaaagaaatcaactccacccggttgaccatcagcattttcttcaggcttaattacagctaaccggaagatattatcttcactaccttgtaaagaatctatctttaatactaattcccctgtatctcgattgtcagcagaataccctcttatatgtactgtaccttttttcaactccttatctttaagttttacatcgttgaccaaaatattgatatcataatcaataatactctcaccaatcggtcgacccctattttcatcatactcttcaatataaggcacttctaaatcacgacgcacctggactgttgcagaatctttatcaagctctacaagtacacgttgaatagcagaaaatctagcagtaccgctttcgctaatagtataataaaggctatcatgcttgccttcagtaagaagatcatttttcaccggcaaactacgaatatcaccgctattttgtacaccaggaacaacttcaacattatcattatcaaaaacaaatttcagttcatatttatctaaaatattggaatcagtaaaaagtactctaactcctgcttttatatcatcaccgctaataacattatcataatgtgccggatatacaggtgctgccaatcctactgactttagtttaaatcgactcagagcggctttcgctaccacaccaccactcgcatccgttacttcagcatcaaaaccgattgtagcattaaccctctgatctgtcttgatttttactaatatttcagatgctctactaatgggatcaaatatgttattgttatttacgatttcatattcgccctcattcaagccattcaccacgattttacttttgtaattttctaatgatgcagaaccatcatcatcttgtagaactacaaacaatcgtaatggaacgttaaaccagtctttatgtgaaacccagttagttacatcagtattaattaaaaacttcatgacttctcctcatctattctataaaaatcaccagaaaattagccactcttttcggggaaatattatttacttattttatatttaaaattattttcacctccttaccaattatttaatttaaaatacttcctgaaatagttattattcactttattgcattttatatgcctatacaaacatattattagatcgagaatatcttagtatactagcagaaaatgagatttcattattaatggcaaactctttaccattcgttttggcgtgaattaacatcatgtttgccaaatcagagatcaaataacaaattactttttcagttaataattatagacgagtaaatccgctaataaatatcaaaatacaataagtgatctattaaaacagataaaataggaaaattaccatgaaatataaaaatatcataaataacacaaaaataaaattatctaatatatatttaattatatttttaatgctcatgattaattatttcctaaataaaaatatagatgatattttcaccatctaattatcatggataaatatcagttaactctcgcattccttgagctgaaaatttaattgatcaaaaaatggtaaaaaatatcattattgaacatcagttaaccaatcaaactcaatttttaattttcccctttgacaagcccaaaatacccagatattattcgcctcgttgtcaaggacaattcctccatagttcagtcggtagaacggcggactgttaatccgtatgtcactggttcaagtccagttggaggagccaaattcataagaagcccgcccgccaagtgcgggctttttgcattcctaattccaccaattgcttacaacataatataacaattccaatcaacccgtttccttccataccctatggatttcaagatggatcgcgacggcaagggagtgaatccccgggagcataggtaacgatgtgaccgaggtgagcaagtgccgccaacaaagaggcaacttgaaagatgacgggtatatagcatacatctccaacaaataagccttattcggcataaaaatagatcaacaagttcagtttgacagcaaacagatcgtttttgttattttctgctttgacaaagcaaaagcatatcgttaatatgcaccccgttgtgaaggagttcctccatagttcagtcggtagaacggcggactgttaatccgtatgtcactggttcaagtccagttggaggagccaaattatgaaaatcccgcttaatgcgggatttttgctattctgacttctctacttaattctcccaactatttactcacaacataagcacggtagttctattcaacttacgttagtggaataaaattccatcaaatctcaagtgattagcataaaaatataacaacaagtgcattttgcccgcaaacaaactttttttattgttttctactttgacaaagccaaagcatatcactagtatacgccccgttgtgaaggagttcctccatagttcagtcggtagaacagcggactgttaatccgtatgtcactggttcaagtccagttgggggagccaatttaagggaagcagacgttcactgacgtctgctttctgcatttctatcaattggttatcccccttcagtcgttcaccctcgttcactaaaaacctctcgaagccatatcattttgatggtaaaaatgctggtaatgctggttcgatttgccttttaccaacaatcgaggggtgttttcatgtcactgactgatattaaagcaaaaaatgcaaaacccctcgagaaggaatacaagttaactgatggctttggtatgttccttcgcgttaccccgaagggttccaaatactggcaaatggcttaccgcttcgaagggaagcaaaaaatcctctctataggtgtttaccctgctgtttcacttgctgatgcaagacaacgccgtgatgaggccagaaggcttcttgctcagggtattgaccctacaggcagaggttaaagagctaaaggccaagcgtgataagacacgttgcttcgctatggtggctaaggcttggtttgccacaaaaacaaaatggtcaaaagattatggtgattccgtatggaagcgccttgaaacctatgtcttcccggcgattggagacaaagatgttgccgagctggatacaggcgatctgctggttcctgtgaaaaaggttgaggcacttggttatcttgaagttgccatgcgcattcaacaatacattacagcgatcctgcgtcatgccgtacagcaaaaactgatactccataaccccgcctatgatatggaaggtgctgttcagaaaccacagactgaacaccgcccggcactggagctggaagaaatccctcaactactgaaaaaaattgccgaatacagaggtcgcaggttaaccatactggctattcagctcaatctgatgattttcattcgttccagtgaacttcgtttcgcccgttggtctgaaattgatttcaaaagtaagttgtgggtgatccccgaacagcgggaagcgattgaaaacgtcaaacattccactcgtggggccaaaatgaagcgtaagcatttcgttcccttgtgtaagcaagccatgaggatactgaaagagatccgacaactgacttataaagaaggccatgatgatggattaatctttactggctgttatgactcgtttaagcccatgagcgaaaacaccatcaacaaagcccttcgcaatatgggctatgacacgaagcaggacatctgtggacacggttttcgcacgctggcctgtagtgccttaattgagtcaggtttgtggtcagaagacgctgtggagcttcaaatgagccataaggaaagcaacagcgtccgtgctgcttatacccacaaggcaaaacacctcgaacagcgccgcctgatgctccaatggtgggctgatttccttgatgcaaaccataacggtatggtcaggccatttgagtttactcaaagaagatagaaatagaggccaaggatggccttccatcatactttacctctattttgtattatctaaaatgaagattgagtagctaaccttatttattccttatcactttgatctgtaactattgcctgaatagatttatattcagacctcaaagaatcgtattgtgaagcagttagaagtctatttgaatttaacacaataacattagcatcatgtttaaattcatttaatgcatcattctccattgcacacagtattatctgataatcctgaggaacgctacgcattaattctttaatgacagtttcataacggtatcccgcctgttcctgctggttgggcgtatcgatgacgaaaggaggcactacgcaagttttagcaccatgaatttgttgcagtacagagagttgataagcaagtaatcctctagcagcctcagcagcaccaccaccaagcaactgtttgtaatcagtgggtgatttaactttgctaaggtttattcctgtcgaacccagtgcttcaatatttgccagcagttttgacataaaggacgagttcaattcttccttttctttggtagaaagaagttttttctggtccttttttaattccttgatggaactgttggccttgctgatgttaaggtcttcattatcgattttaatttgaatattttttgagacgttttcagtagatagagtatcgattacttgagcaatgagaccttttttaaccgcatcgtcgtctgtaatgtatttattatttattctttcgatttcgttagtaataaactgagcgtcctcatttaatgagttcaatgaagatttgagttccactattttagatgctattgaatttgcctcattaagcaatgagtccttttctgaaagaagcaacgctctgttaggtagtgagttatcgtgaagagtcccacacaatggacactctaaataatcagtaggtatggattctaccgcaaatttataatctgcctcgagttcgtttgcagaagtaatggctaacgcatactgactttcgagatcataaatatttgaagtgatcgtagcctgagcatcataaagtcttgtttggtaatcaatcaagtcgtaaagttcattttttatttcattctgaatcttaatgaagtcattattatctaaagttataggggaatcaaccgtgttatcaactataacttcaacggcgctttgaaatttttctattttatgtgctgattcttttttgatttcactatattcataaatgttttcctcaatatcaaaatgctcaggcttaagataaccagtaaagtatttgattaatggacctttccagttggaatattgccctaagttctcgaatgaattccaaggtgaactccagctttttatctggtcaatatagaatggtaaaaaataatatgctggaggaggtgtctccaagtttccatcaccacgattaggaagcttcattttgaaattgacgagatccgagaagcctttcgaaaaatcaccagttatatttatatatctttgagcttcatcaccgatagctcccaaaattattgagtgacttcctcgacatgaaaaatactctttgttatttaaagtaaaatataaaatagatttaatgtcatttgatttccattcttcatcgaaaacaggatcgcatcctaaagaccacagtaaactttttgctagagtggacttgccaatactgttatcttttccggtaattaaattcaatcttttctggaacgagaactgattcgcaagtcttttcgaatctgatatcagaactaatcgttgaaatttcaagcttctcatttttcttgttccttaaattccgaattaataatttatagttttctttattacttccaatattattcatgcatcacctttaaaaagctataaactatctcgcataatatatcgtcatgttctggtacttgatcttcaatattaagttcttgagcttttacaataactgactcaatgtaatcacgggtttctgtaaagtcttcttctgggacactacttagcgcctgctggactattctcattatattcatatcaaaagccgacaaatgtccgattcggcgcaagaaaagttgttttatttttttattaatcttccgataagttaaggtgttccatttcatatcatttttagctaagtactcaaagtctttctcaaagtcttcaaattttgggcttgttgtgttaacagctataacatcctttaccttatgagatgtgagagatttatcctctaccattttctcccaaacagtaaaatcgtaagtattctgtcctttgcgatgaatttcatcgattattgctctataaatattaacggcattacaatgactatttggaaatatttcatttactaattcagcaaatctaccaatgacaaactcttcttggttctctaattttatttttggaacaatgaattttagattttctggcaagagagctattccaagctcatcctttaatttttcagttaaccccgataagcaatctacactaagatcacctgaagttataatgtctaattttaacttcttatctctttgttcaaatgagaaaccacttgaggacacaagaccgatttccgtaatgcgtgcttcatagtctgtaccaatacatgagcttaatagcttacctagaatggaactcttagctccctcagcaccttgctctcgtttggttaaggcgtcagaagtgaaaggttttccagtattctttacttgaaaaaattcaaattttgccgaacttccatacaatgagtctgcgataacgacatcctcatgatattcgattaataatgcatagtcagaatttgatttatgcttttcaattattctgcataaggcccaatgatattgaaaatcatattttccgaatgtggttgctcctgaaatttctctttgagcatgacccaaaacattacgttccattgaaaaccccacccttacttaatgaatcgctactgacttttctaaccaatctaatttaggaagggcaaaaagtctataaaatcgtggtcttagcccgctctgaagtagagctatcacagcacagagcgttgcagataaacagagccagcatttttttcaacatatgctaccagcatctcatgctcgtgtcggtaatcgagtgataaagacaatgatgatgactatcagggatcaatattgatggttatatggttgcattgacaggtcaataggtaattcattatgcaatatagttatatgaaaagtaaaaatcattcagatatgcaataagtaagacaacagcgttcacattacttacactcttaggcaaacatcttgatcagcacctcctgatgttgcagtggtggacttgttatctaaatagctgtatctaataccgctacacttacgctgactggcatgtaacatgttgcgtaaaggcatacatcgtagacctgatacagcgtggtagacagagaaaacagcaccaatgccttacgctctaaatggattgctatcccgcgcagctatttaggtgccaatattaatgacatggtcaggctatctaagtttgctcgcagcaagtaacgacctgaaagctaaggatcgcgttgccttatgcagtagacatacacaatacaaggatttaatctagacatgtcagtcatagtaaagaaatggagtttgtgttgatcattgaatatgctgtggaaaaagaaacaaaacagatcatgcatattgatgatgttcctaacggggctaagtgtaattgcatatgtaagtcatgcaatgatgaattaatagctcgcaatggaggaaaattaaaaaaacatcatttcgctcatagaaaccttattgagaatcgtgcttgccgaatgacacagctgcatttagcaatgcaacattttttccttcgcttagatgtattaacaatacctcaattgacttttgcgtataagaaccacacgctaaaaacaccactaataaaaaccaaaattttatccgcaactttagaacaccgaattggaaactatgtatcagatgtctgccttaacacagacactggattatacatcgtggagatctgcgtaacacataaatgcgaacctgaaaaggtacgttactttaaaaataacaaaataaattcagtagagttagtgttcgaatactctgaagatatcgagatagaagaatggcatcaacgtattaaaaacaatcaagtccccaatgaatggttttattactctgagagtattaaagcgattgaatgtcatgagttagctgtcgaaaaagaaataaatgagaggcgctcaagaagattaaaaaacacaataaattcaataaataaaaccatgaaaaataaaaccgtattcctgccaagtattcacgacagtatatcttatgaagaatctaatgaggtttttactgaaaacttctgtctgtacgcaaagaggaatcgtaccgttgataagctatcgcttatacaaaaaaccgatggtggttttatcgtgcgtggagacatcttgcataaagggaaagaatttcatatatggataatatatttactaagttattttaatttgaatctaatggatgaatttgatggaagtgtaattattagattctatcctgaagatagtaacaaaccgcaatggcgctggttgaaacatccgtctattgaaaaagaaaaatcacgagtacggtctcaatttattaaaacctgtaaagaaaatatacatataaaatccctaacaatttatatgagcaatagattaaaaaatcgctcatatgagtatttagacatgacagatgaactcttcaatagagactataacacatggagtaaatggcttataagcaatgatctatttacaccaagcatacagaggaagtggccaaaattacctaaaatgctcaaagaaatgaaagaatcacccagcctttggatgttccagagatggtcaattttagtaataagcatcatgcttaatataatagataatgtatcaactggaagcagcattacagtttataacatatttgatgaaatgagtgacatcctacctctcgatcctgaatttatatctttagaagcagaagcaattgccaataagaaaaccattcaattacctcatcgccatcttatttttagaaggcatataatccttgaggttctacgaccattaatcgaaagaagtattttgacggtgaaaggtgatattgtcattaaagaaacaccactgctacaattgtttcttcaaagcatagtttaactgtcaatcggggaaaagatctctgccagataaaacccatgaaaaggataacaaagtgttaaacaaaataaaacaacaatccatcttgggattaaaaaacatagaaaaaatcataactctaataatttttatgtgtacgttttcaggagcatggttcctctttagctatgcacgcacccacggtgtgaagtttattgatctgatacaatcaaatttactcatcagtacaggtgcattatctttttttataatactttttattgttggatgttttttaatatcattcaacttatctccagcaattgcccgatgcctctattatgatatattagtcaaagaaaagataaaggggataaaaagaagaaaattaatatatttattatacttcacatcatgtggagtagcttcttcattcgcattttaccatttttatgtcggagtttcattagttgttataattgtacttactcttcattttttagcgataacaaaaccctttcattataagaaaatagccgtcacattaaagttatttttatatacggtattattattagcaataagcattgctatgtttgggtttctttccattacactgaactttgatatagaaacaaatttttcttttattagtattattcaagctctttcaatatttgttattatcgttacattggcgattattggattagcagacatacatcaacgtaatcgagatcaaaagaataggatatggtgttacgtttttttctccttgcttattgttttttatattgcaacagcattttcaacaggtgtatcagaaaaaatagcgaatatgatcgggttaggttatgttaatcaatgttatcacgaaaaggatctggtgaaatactccatacctgaaaggttagttataatacagaaagacaaaagcaagataaaactattcattattgctgatgtagacggaaagatatacatatctaaagataaaaatcatcgtgcagagtttatgttcatagccaaagaactaagtgaagtaagttgtgattaattagacaaatacacaagcaaaagggccatacggccctttgttttccctttaagggaactacccattgggcagaatacatacccccacacttggggcaactcaatcagcccattgggctgtaaaccactccccatatatggggcaatcagacacttcgttgaagtgaatgttctcaaggaacacttactaattataacattaaatatcaattgtcaaatatatttatctatttaaataaaagattatcataatcgcttactctggataaatttaatcccccataaaaatctggaggatcaaaaaatatttatcccacatcgcttttatgagtatattattcctgccttcccaccatatcctcaggaaatctttttcctcgtaacttaattcttgctttagcctccacattaatattcgaagcctgtaataacattcccaatacaaactccttatcgacatcttctactttacagccaacagctttagccacttctgcccctaaaataatcttcagacgtgtttcagcactcttggtcagagatttttctttgctcttaagtcgattcagatgcatctgtgccgaagctattttttgtttaattgttttttctattcgtggttttctgcttttaatatctccctgtttactcatcagaattcttcccttttttccattcattcatgtaaaatgaaagaagtatacaaaaaacatcatcatttccattatcaacggtatgccagaacagtttgccgggaaagaaaccgattaagttcatcattgagatgttttctccgagatacatgagtgaatacaggtaagcatccagagacacgcaaaatttataataagcagggaaagatacgctgtcatggcgttcaagaaagtaatccataaagcaacaaaaatagaatagctcatcgtcaaagtcatcattgttgatttgtattcgtttttcaaatccagtgaacgattttttcatctccgctatcttattgaaatccagccccatgaagttaatgtatttatatgtcatttatttttccttttgttgttcaatgattactcattgcaatacaattaaaaaatgaaaaggtcaaataatatgacaatgatgtgttataaataatgaagcagctctgtaagattgttttaaacaatcacctgctgacaggcttaccctgttaatgatgggatttatcccgaaataatggtgttttggttttaaaaatgagatatcagtaagctcaaaataaaattatgcaacacaaacgagtgcaaccactaacattgaatgtctgatactctccgcgttacttattttatcaaattaatgaaaacaatttcatctattgtttttatattctgttttctgactttaacctgtgaattgtgcagcacataaaagtatcagttattttcactatttcatctgatttacgctttcccgccttacggcgggaaagaaaacactacttttgccctcgcgggcgctctcagagacccaatataactacgctacctctgccgttcgtccgattcctaccctattaatttcacagacattaaaactagcgttattatttaagcatagaaaaactttttacattgtcgttatttttagcttctttaggagatataaaaataaagcaatgcccacctatacactcacttcgtgagcgtgtggggtctaccgacggttgcctgccgcaggctaaaagcaaggtcaacgtcaacaccagagtttttcttacgaaaaactaaaacctgcatagtcgcattggagatttatattttggtttgatatttaaatttatatgaggttgtttatattgcatggctatttttcatcttgattttaaaattgtgaaacgctctgaaggcaagtcttccgttgctaaagctgcctatcatgcccgttgcagaatcacagatgaaagaacaggtgatacctatgattatagccgccgtactgatttatgcgggcatttcatattagcccccgttaatgctcctcaacatatcgtaaaggactccacggcattgtggaatgaagttgaaagagttgaacgtcaaaataacggacaaacagctcgttatttcgatgttgctattcctaccgagttaaacaatgatgataagaaaaaacttgtccttgagtattgtcagaaaaatttcgttgataaaagcatgattgctgatatcgctttccatgatcttgatagtgataacccccacgctcacgttatgttgacattaaaaaccattggcccggaaggttttggtaaaaaagaaagaagctggaacgacagaaaaatgtctgtgttgtggcgtgaatcatgggcatcgatggcgaacagcttccttgctgctgctggttcatcagaacgtattgatcatcgttcccttcaggcccagcacgaggaagcattggaaaaagcagcagtagctttagataatgaagaaaaagcgctgtggcttgctaaatccgccgaaacaaaccgcccttctatgaagcgtatccacagtgctaaatggcgtagtaaagcagctcaggaacaaagagccgcagaacaggctgttcgtgatgctgccaagcaagaagccgttgaagtctacaaaacattcagtgaacttgatcttgaaatcgtcgttgacgtcagaagctttactgtagctgttcttgctgaaccagaagaaattgtattacctgaatcccgtacctgttcattgaacgctgaagaactgaaacctgttctggtcgctccggctcctcatacaagagccagaggtgttaaatcttaccgtgataaaacaaaaatcagtaaggtcgttgctgctaagaagccatatgtaagtatttctgactctggaacaaatactcttctgaaaacaacctcttctaaaaccccaaaaaggccatccagaatcgcccctgaacatgttaaaaggatacaggctactccacgtcaggataatatctttaaacgcttcactgctcttttagttgattttatcagagataaatttatatgggctaaaacgaacaaaactaaagttgatattatcagtgaagaacatgataaacgtattgctgaaaactatgtctttgatgaggtattaggccgtcgtgtttcacgtagtgaatatgagaaacaagctaagtttaaccacgatgactataagccaacaccggatgagatcagccgtttcccaagtcgtattaatagcgttaaatccgttagtgattacgataatgggacgtcaccttcattaccactcgaactaattaagggggtaaactttcttaaactcaagccatcaagctctaatatcattaagaacaaatgacaatcaaacatttttgatataaaatataaaaattactcaacagtgaatggtttgtaaaaaatggaacttaataaacatataattgacaatctaaattattatttaaatacaagtgctccagagtatgctttcatgattactggcgggtggggagcgggaaaaacccattttatagaaagttttataaaggaatataatgaaaacgccgttgataatcagtctggaaataaaataataaaaataagtttattcggatttaaaaccacatccagtattgatgaaatgatttttcaatcattacacccactattaggccacagatatactaagttagctggtaatattctaaagggagcattaaaactcggttgtaagatagatataaacggcgatagcaaaccagatatagatattaatgcaagtttagataaaataaaattcagcgacatattctctactaatacggatagcggagagatcatcatagctttagatgatcttgagcgtactgatatcccgttaaaggaaattctgggatatgttaattaccttgtcgaaatttcaaaggttaaagtcattctcatagctaacgaaaaaattctatatgaaaaggataaatcacacgaggataaaactaaggatgtttattcaaaatttaaagaaaaagttatcggtaagacatttcaaatcaagcataatattgatagggttttgaaaggtttccttgatcaatcaaaatgtgagtcattaaaaagacatagagatgtcattaaaaatatttatatacgctcagaggatacaaatctcagaaaactcaagcaaagtattttagattttggatacattgcaaattatatcgatgaagaacaactcaaaaatgaagagtattcatcgctgttgattcgtgttttctttgctttatcattagaaatgaaaagtggtgagctaagcgaggaaaaattaagacataatgagccattccaatgtgaaaaagccaatagcgatggttctaagaatgtatttcataaatatgacattagttatagaaacttgtataccggtgatttatgggctgatattttgttcaaaggtgatgcaagtaatttaaagtcagccactgatgaacttgtatattttaaacaaccaaaaaacaatgagcatcccctctggttcaaattatggaattttaacacacttaatgaggagcagtttatctctcttaccaatcagcttcttttggagttcgactctcttcaggaggaagagcatcaggtttacttacataaattagccttaattatttacttctcaaaaaacgctctaattagtaaggaaatcgatgaaataaatgatacagtttataaatacattaaaacctataaagatcactgggctattttggacaatcactctattgaagatatagtatttggaaacaatactggctatagctactacaatgattcagatgaagactttagaaaactatttaatttactcaagtctgaacgtaaatctatctctgacaaattaaaataccaagcagaaatcatcagagcaaatgaaatatttacataccttgcgcaaggaaacaaggatgagctgatcaatattttatatactgaaaatcagtttaagccatttttcaataaattaaatgctaaagacttagtaaaatgcttattacaatcaagcaatcatataacatcttacttcacttatatcataaaagaacgttatacatcaggagatacacttaacggtctaaaagcatgtaactatctgaaagttgaagaggggttttggattgagttacaaaataaaatctcgaaagaaatacctcgaatgccgcccctaaaaaaacatttcatggaacagcttgatacaaccattaaggagataataacaatcctatcttcagtgccaaatgtgtaagattctggggcaggacatattattgaccagcccctaaaaattacattcttcgcctgaacacaacattatcagagaagatcgccttaccttctataaaagctacaataaaaattattggcaggctgatagtagcccccgccgtacctgtagacattccaatcagtatagacaggccaaaggacagtaagatagctacggcagcataccagccggggaaggctccatataaaacagtcgccatacaaccggtacaaacatgcacacctcgctggctttctcgcaggcagaaaggacacttgatggtattgttttccatgatagccccttagttcgctttccaaccattgctggttttaacaagattcatggcaccatcagcaggttcattcatccctttcacaccagagaacgcgcttttgtccacccatgatggaacatcagttaatttccatgtataggtgacgcggacaactttctgattaccattacccggctcagtccattccttcacttcatcaacaacccggcgaccaatacaaacaccttctttggcatcccagattttggctagtttaccttcatctgttatcccaagcgtattgttatcccagcctttaacaaaggccattaagccctgttctacgagctgtctcttgatcagatctccaaatcaattgatttagccagcaaatagccgtctatcagggtttgcagccgaaaccagccttcccaaagtcgttcccatccgactcgacccgtgcgtttggaatcgtaccagccggccagttttcccagattgatgaaggcccaatgcaaactcggggcttttttcggcacacggcgtttttcttgttttgaccacagtaatttccacgccagggggcttaatactgtctcacagctctctttctctgcctcttctttgttcagacccataaaacgcagctggtgtattcgtaccgcaataaaggccagcagcactatcattacgtacaagtcgttctgctatttcctcgtagttaacctcatcaatatttccttgattaccttcctgcgtagtaaacttgtcaaagttatgacaaatatgattaatcatgagccgtataaatgcactcataaaatcagcatcatcgacaagatgcgaaatgctatcactacacatatcctgcataacttcccagcttgcttcaaatgaacgtttagcaagatcataaaataactctgtagatgtattttcaatttcaatgttttttgacatgacaactcctcatattaaaatgatatatatttaactggcggattcgactaataagtgcaatttttcagaagggcggtcagttgctatagtaggcatctttctcgccaaaggaaaatgcactatggcctatacacaactgaccgaaacagaaagataccagatttccagtttaagagaagcgggtttttcacagctttttattgcgaagtcacttaagcgaagcccatcgaccatcagcagagaattgaagagaaatcaagaagtccagacatactgccctgaacaggctcatttgaaggtattggcgcgtcgtcattttgctaaaaaggccgtgaaaataacgccggaagtaaaaagatggataaaacggttaatttggaaagatttaagccctgaacaggtggctgattatttgaagcaacataaagggatatctttgcatcatgagacgatttatagactgatttatcaagataaaagagaggggggtgatttatggcaacatctgcgaatagccagaaaaccctatcgcaaacgctatggtcgctatgaaagaagaggtaaaattaaaaatcgggtcagtattgatgaacgcccggaaattgttgataaaaaagaacgtattggggactgggaaggagatacgataatagggaaagataaaaaaagtgtcttattaacattggttgaccgcaagacgctgtatacaattatcgttaaacttgatagcaagcaggcatcagaagtcgcgaaagcagcagtgaaagtattatacccgttaaaacaaaaggttaagaccatcacgttcgataacggtttggagttcgcagatcatgaaatcatcggtgaagaattagaaacccaaatttactttgctcacccttattcgccttgggaaagagggatcaatgagaatatcaatgggttaatcagacaatactttccaaagggaaccaattttaatgaaatctctgatcaggaaataaattttgtggtaaaccgattaaataatcgtcctcgaaaaacacggggtgggaaaacaccgaatgaattatttaaaggaatacgaacatgtttacttccagattaacgatgttgcacttattatgtgaatccaagactttatttttattcggcccaatgacagggcctaaataaaccagactacttttgagactctttcataaaacctttatcctgatgatatgctttcagcctttccatcacataagcaagatcaaccagttttactgatacaccttcagcgccggggtgatgccgctcgaccaatggtaaatgtgatttagcttttttgatacattctttaaaaacaactcccatgaaagcttcatcattacatagtgcttcaatctcatcaggacgctcgttcatggcagtgcgcattcttagatcataaaatatcgtcatcaaatggaaaaaacatctattcgattcggtcttaagttctttattcatatttatatcctcatggttagatacagatttatattctctttcgttgctattagccccttgcggggccaaatagagataacagaactattagtctgagtttaacatcacattatgcataaacctcagattgactttgacctcatcgaaaaacacctcttttagagatcctgcgcttttgttttttttcaggaactgactaaatccctccttactgttttctattactttatcaaaaacatcatccatatatttcatgtccgcaatatttttaaagaatcggctccccatgtattcctgcatattattgatataaagctcataaccttcaaatgctttaacaataaacagtctggttgattcattggtgactgttatcacatgagtttcagttattgtattattcatattcatattcatattcatttccttctataatttgagtgaaaatatccctacagaaaacctgtattattttatttcggtaaggaatgtcgttaatagcaaacttcttttttcagattttacataaaacctccttatattattatattaacagtatctattaaactgcttgagtacgtgatgcctgaataaccttttcgatccatgcatcaatctcactttcaataaatgctatagaacgcaatccggttttaacttgtttaggaaatttacccgctcttataagggtatatatccacgttttaccaaaccccgttcttctgattacttcgggcaaacgaataagtttctgatgtttgtctgttttgatttggaccatgtttatctcctgtgttgttcgatggagataattctaggattttggctggttctaaactagggacgttcgcaaatcccgaacttcgcggaaactggtagaggggaagtagttatagggatactcacagatagtgaacatcccttgtgtttactttttgtctttatcagggggctttatcgttgatttttatgacttcagtgatcttccagtcctttaacaggatgttttttatatagaaatcattcaaaaccttgaaatactcatccttatcgagatagcttttcgcgtaatcataatcagtatctttgatgtgatcacggctccgaaccccgccagtaccatgcaggatgtcagctaaaatgttgaacggtatgttcttaccttcgttgtaggtctgttcccatgagatcaaatccattaaagggatgactttgtaatcaagtattctttgaaaggtcttatgaccaaaacgaaaagatcgtttaggtggttttgccgttttaaggtgcttttgccatagagcaatcagcactttcaggtgttctgcgagatcgtcactgctggcttgttccaagtcaatttcgatcagcatcttgttagtagggttcatgcctccttgtttcagatactcagagatgtagtcagaactcactgcaacaggatctgtttgctcagaagtctccagtcgatacatcgcccgtccatagttaaacaatgcacctctggtcattggtctgacagcatagctatgtgagagtctctgattatctgaaatccatttcgattcaagtatcacatcaccgcatcggattgttgcctcatggtatatagcttgcatttgattatttttgcctgctgtatcccattgctgccttgttttgtaagcaaacatccgtctttcaagttcagcatagatttgctctaaagtaagatctttcagggcatcatatcggcgtacatcaaaccaagataaggctgtcctgatatcgtccatttccttttgagtagtcattgttcttgtcctgccgattacattcatgtttcataaaagttagcccattcaacatgatagagaaagtgaaaatgaggggaaggttttcaaaatggtgtgatgacagacaagtaaccttgaagatgagcaatctcatcttgactaaacatcttttatttactaaacaataactaattgttttatatcaattactttcagaaaaataacagcaatatcgtattgacagagaaagtaagaaatggcgttcatagttaacccgaattctggataagaaattgacgagaagcctgttccaggagcaaagttttggtgtgcaccaaaaacagctccgaggggggaacaggctatggacaacttagttgaaattttctgtgatgtcgatgatttttgccgttttttcatccctcaatgggaacaattttgtctcgatagcgggcatcgtttacgccgccgacaaggtcatatgtatcccagtgaaatcatgaccattttgatcctttttcatatgtcgcattaccgtgattttaaacatttttatctagaacatatttggaaatatcaccataaggattttccaaccttgcttagctatcctcgttttgtcagtgtggctccttccgttttggtgccattatgcagctatctgactcaattaaaagggaaacccacaggcattgcttttattgattccacccgtttgagtgtctgccataacattcgcatccctcgacataaggtctttgcggggatagcaaagcgcggaaaaaattcaatgggctggttttacggtttcaaattacacctggttgtcaatcatcagggtgaaattctcgcgcttaaagtgactccgggtaatgtggatgatcgggaacctgttcgtgaattatcaaaagaattaacgggttctctttacggtgacaaaggttacctcagccaggaattggcggacgatttagctaaaaccgatgtcactttcatcacgaaaaaacggcgtaacatgaaagcgagtatgcaagctgagtgggataagataatgttaaaaaagcgttttatcattgaaacgattaatgggcaattaaaaactctttctcaaatagagcattcccgccaccgaagtataaaaggctttctgttgtgcgttttaggtggattgattgcttactgccttaaattgaagaagccatcactgaaagttttctactcagaagacgatttttcaatgacggattaagcagaattcgggttagttagatagttatgacaacaaccagttgtttttaattgacatttttatcataagaaaacaataatgatggtaaatatgttggtaaataatcatgttattttcacaatggcagtaataataggagatacagatgaagttcgagtccagtcagaggagccaacttcatttattttttaccctcatatttcatttttcctttgttataagaaaatccacctctgactaccctaacctagttgatttggctgaatttttttctaaaacttatattcattaatagctattcaaccattttagctttatcatccattcccggcctggatatgctgaactcagcatcttcattcctatcatatatactggagccggtttctcatgaccactgaatcatacacaataaaaatccgccgccctgatgactggcacatccattttcgtgatggtgaaatgctaagaactgtcgttccctacaccagtcattactttggccgagctatcgtcatgcctaatctgcttacgccgattacagaagtggtcagtgccaaggcttatagaggcagaatactggcagctattcccgaaggagataatttccagcctcttatgacttgttatcttactgacacgactgaaagctctcagatagaaattggttataaagaaggcatttttaccgcttgcaagctctaccctgccaatgccacaaccaattcaagtcacggcgtctctgatataaagaatatttatccactattagccgtgatggaaaaactggggatgcctctgctcgtccacggtgaggttactgcttctcatattgatattttcgatcgagaagcccgttttattgaacaagtcatggaaccactacgtaatcaattcccagcactgaaagttgtgtttgaacacataactaccaaagaagccgcacaatatgtgctggaaggcaataacaatctggcagcaacattaactccacagcatctcatgttcaatcgcaaccatatgctagttggtgggattcggccacacctatactgtctgcctgtgctaaaacgcaatgtgcatcaagaggctttacgggcagccgtcgccagtggctgtgatcgcttctttctaggtacagactcagcaccacatgcacaacaaaagaaagaatcctcttgtggttgtgccggcgtctttaacgcaccatcagcgctacctgcttatgcaacagtgtttgaggagatgaatgcattaccgcattttgaagctttctgttcacttaatggccctaaattttacgggctacctgtcaatgaaggctttattgaactaactcgcaaaccttctaccgtcattgaacacattgattgcaataatgaaaaacttattccatttttggctggcgaagatgcccgctgggatgtgaaagtaacagactgatataacatggggatggtcatcatccccattaatttacatagttaccaacacaccaactcataattcctaacaaaaaaccttcttactttcattaaaaagcatatactaactaatgactcattcaggaatgaggtagtttgctcttagtcaatgatattaataaataatgcagtgatctgattaggaggttttatgggcagtaaagatgaagttattcaaacgcatcctgttgtaggctgggatgtcagtaccgtcgatacatatgatgcagtgatgctacgccttcactatttgtcctcccaagatcaaacaccagaacatgtcatggtagatcgaaccttatggttgacaactgacattgcaaagcaattgatatacatcctccaggcaggaattgaaaagatcgaatcttcagaatacagcgatctaaaccatacaaaacattaataatcttaaacccggacacccgtataaatgggtgtccggttaggagacgcatcgattcatctcaaagattttgtctggaataccatatcactatataataatttcggattaagctaacttaaccatcaaatttgccgagttgactactgatagatggggcgtttattgtgagtttggccaaacaggaacagggatgtgcaataatgaaaatcttaattgttgaagagtgctattatacccgttcaggtatcagagagtttttaaagaaaaatgataatgtcgaagatcttgaaattgttgactcaccttcaattaatgaggcgataaatattgtaactcattttgctcctgatatcgttttagctaacttgacacattattgtcatcatgccagttactgttccgatttacagaaatttataactcttacagataacactcgtatttatatataccttaatagcgcctatccttattgtgacaattatattacattgaaagataatgctgttattctggcaaagagaaatcttacctatctgcttaataaaattagcaaaaccacattgcaagaaattcagagacacagagcaacaatcgaccagtattgctctattttcagccctcaagagcataaagttatcgattactggatgaaagaaatccctaattaccagatatcccaaaagttaaaaatcagtaatagcacagtctattctcataaaagacacattactgaaaaaatcaatgtgcgtaatagaattgaactctgctttatttacaatgtatttaaatatctctattaatcaaatcaactggcacattgatctctgtgccagcgattaatcacgttattcaacagactgtagtgaagtactgttcaacccatcctgtagacggtgccgggatttattaaatatttttgctccattttcacgaccagcacggcgagcacgctgctcggtttccggtaacctgacttcttctctgcacatttcactacaacagccttcaaatttagttgcacactctggacactgaataaatagcaagtggcaaccttcatttttacaattagtatgactgtcgcaagacacgccacattgatggcaatgagcaatcacatcgtctgaaatacgctctcccatccgctcatcaaagacaaagtttttaccaacaaaacgtaccggtaatccctgttctctcgctttacgagcatattcgataataccgccctctacgtgatagacgtttttaaagccattgtgcagcatataagcactggctttttcacagcgaataccaccagtgcagtacattacaatatttttatccttattatcctgcaacatttccgcaaccattggcaactgttcacggaatgtatcagaaggaacttcaattgcattttcaaaatgcccaacttcatattcatagtgattgcgcatatcgacaaatagcgtatcaggattatccagcatctggttgacctgctctgctttaaggtactcgccggtttttgatggatcaaaagtttcatcatcaatcccatcagccactacacgatcacgtactttcatacgcaaaacccagaaagatttcccatcatcatcaagcgcaatattcagcctcaaattatccaatgcaggatcaacgctatacaataacgccttgaatgcttccaaattatgagttggtaaacttatctgagcattaatcccctctttagcaatataaacccggccaaatactgagaggtcggtaaattgttgatacaagctgttacgaaaatccagaggatttaagatgttaaaatatttgtaaaaagagatggtcgtacgaggttgggtctccgccaacatacgtgctttcagctctttattagaaatgcggttgtgtaacactggcatggtgtactttcctgaatttcaagtcataaaatagggatgtataagtgatagcctccgctatcaagcgtaatatacctgttatctttcaagttgcctctttgttggctgcactcgctcaccccggtcacatagttacctatgcttccagggattcgctcccttgccgtcgcgatgcatcttgaaatctatagggtatatgataacgaaaatgattttcaacgagtagtcatttgtaactctctatcaaggctggaaccaatcatcagcgctttcccatgtctcttgtagaatctcttcaacagctttcctgtcatcaggagtgccaccacgaacagacagcccatcatgacttgccaacttcacattggttttaatatcaggccagcgacgtttaagacggttatctagttctacagcaagcgcagggacagcaccttttggcagttttttagatttatcgatcgtaacttctacatgcataattacatgcataattacatgcataatttttccctccacaaacaatactgttcatataaacagtaatattatctacataaattgtaaatagctctgtaaaactattttaatttttatttatcagtaaattacgagctatcactctttaccaatgacaaaagctaagtgcaccaaaatcaagatcataaacatttcatacttgaaaacttcgatatcccgtcaaaaaatgtcacaataaggaaattgttttgtccatcttgttggaactataaaaacctgagaatccatgatacaagcgccttcttttcaacgttcactactgcatccccgttattggcctacttggtttggtatcagtctgctttacttactggtgctgctcccctatcccattatttaccggataggcactcgtctgggccgattttctatgcactttctgaaaaaacgtgccaaagttgccgaaagaaatcttgagctatgttttcctgatatgccacaagaggagcgcaacgcgctattaataaaaaactttgaatccgtcggaatgggaatatttgaaacgggcatggcttggttttggcctgactggcggatagaacgctggtttaaagtgactgggcaagaaaacattcagaaaattcaaactactgggcaaggaattattgttattggtatccatttcctgacactggaactcggtgcccgcattctcggtttgctcaatcctggcattggcgtctaccgaccaaatgataatccagttatggattggctacaaacatggggacgactgcgctccaacaaatatatgctggatagaaaagatgtcaaaggcatgatccgctgtctgaaaaatggcgaaattgtctggtacgcccccgatcatgattacggcccacgaaaaagtgtatttgcaccactatttgctgtagaacacgctgcaaccaccaccggcacgtcgatacttgtgcgcctcgctgatccggcaatgatcccctttactccccgtcgtctgcctgatggaaagggttatgaactgattattcaaccaacagtggcaggatttccaaaagatgatgaagtgaaagcggctgctttcatgaatagagttgtcgaacaggaaattttacaggcacctgatcaatatatgtggttgcatcgtcgctttaaaacccggcctaaggggatgccttctctctacgggcaagctgataaaatccattaaatctattcatggctgtttctttatccaggaaacagccataatcactttggtatccctcaataattgactatctcatttcaatgctgatgccatattttttaatttaatttttttccaatttttatataagaaataaggattcatttaaaatttcaaaataaatactaaattgacaatcaaatcacgttacttttcttacccttcattattaccgttaatatctagcctttgaaaagataccttatatacccgttatccttcaagttgcctctttgttggctgcgctcgctcaccccggtcacatagttatctatgctcccggggattcactcccttgccgtcgcgatgcatcttgaaatccattgggtatatattaccgttattatttaatttattattttaaaatattttttccataaaaaaacatcgaatataaatagaaataagtcaataggttttatcctcattttagcctattaattatgagaaatgagatttatgtcggattttgctctgaaatatggaatataaagtaagagatatcctacttgttaataaaattgatcgaaaaatatgttaaaaatatattaacaagataggacattatttaataaaaacgtggcttttttgtttgctctaaacctaaatttaaaagagctttttaaaagctttatttgtcacacacactgcactcttagagtgtagtcttataggaaaacttagatgcaatcctccattaacaatacgaaaaccagaactttctttggacatccttatccattaagttctttgttcttcacagaaatgtgggaacgtttctcttactacggcattcgtccactgctgatcttattcatggctgcaaccatctatgatggtggtatgggtattcctcgtgaacaggccgctgccattgtcggtatctttgcaggtagtgtgtatctgaccgcactacccggtggttggctggcggataactggttaggccaacgtcaagcagtctggtatggctcaatcattattgcactagggcacttgtctatcgctctttccgctttcttcagtcattatttgttctttattggcttattactgatcgtattaggtacaggactgtttaaaacctgtgtcaccgtgatggtcggaactctgtataaaaaagatgatccacgtcgtgatggtggtttttccctattttatatgggaattaatatcggttccttcattgctcctctgactacaggcttgctggttcgtgactatggctggcactggggttttggtatcggagggttggggatgctagttgccctattgatattccgtttctacacgatccctttgatgcgtcagtatgataaagaaggtggtttggattcaagctgggaccaccctacagtgaagcgtgaaaacgtcggcaaatgggtctttaccactgttatcgctatcattgctattattgctctgctaatccttggtgtaattccattcaatccggtagccgtagccagcgcaatggtctatgtgatctcatcctgtgtaacactttactttgcctatttgttcctgtttgccggcttaagcagtagtgaccgttcgcgcctgctggtctgttttatcctgctggtatctgctgcattcttctggtctgcatacgagcaaacaccaacgtcattcaacctgttcgccaatgattatactaaccgtatagtgatggggtttgagatcccgacagtatggttccagtcaattaatgcactgtttattatcctgctggcccccgtattcagttggttctggcccagattagcaaaaaacaacatcaacccgagcagcattagtaaattcattattggtattctgttcgctgccggtggttttggcgtgatgattctggctgcgcaaaatgtgctggcaaccggtgaaaccgtttctcctttctggctgatatcaagttctctgtttctgacactcggtgagctgtgccttagccccattgggctcgcaacgatgacaatactggccccatctcgaatgcgcggtcaggtcatgggcttgtggttttgtgcaagtgctttgggcaatctagctgctggcttaattggtggacatgtgcgcgctgaccaactggacaacctacctgatctgttctcccgtgtatctttggcactggttatttgtgcagccgtattaatggtattaattgtccctattcgccgcctgcttaacagtgctgataaatcagaagcgaaagctcaataatatttatacccgttatctttcaagttgcctctttgttggctgcactcactcaccccggtcacatagttctctatgctcccggggattcgctcccttgccgtcgcgatccatcttgaaatccatagggtatatcactcacgtaaagctatctcatcataagatggctttacgtatttcaacgcattcgtattcttaaaaacaaacacattagtgcattgccgctgtaactgatagcttaactatctgttttacattcagtgattccgcttgataggcatgattacgcacatcccacagttcaactgaatgttgaatattaagccaaaactccgctgtattgcccaaagccgctgccaatttgatcgccataggaacggttagcgaacctttatcatgcacaattctacttaatgtattgcggtgaacacccatagcttccgcaagcacattaatttcgatattcaaaggcaccagaaactcactcaccaatatttcacccactgttgcagggcgacgttttgtattcctcatcatttatttccctcagtttaatagttatgaggatccagatatgtatcaaccgcaataccatcaatccattgaaaaataagcctatattgcttatttactcttattgagcaccatcccctcaaatagccattcaagtattcaaaatggtttcccggagggattcttaaatcagcctctttaaccgaagcatccaaaatttgtagttttctgtataacgcacgctgtaaagatgcaggtatgcatttgtgcggtaaatcttgttcataaaatctttctagccatccatccctgaattcaacagccataacatcctcgttgtttgtatattacgcacaatcacattgtgcatcaagtcataaaatgctgaaaatatcatttgcctttacgcaacctggctggagtacaaccataatgttgactaaatgcaaaagtaaaagctgactgggaggcataaccagacagaaaagcaatgtcagccaaagtcctatcactgtaagccaacaaattataggcaaattccatccggcacgtttttaaataagccattggactcatccctgttgcattaaaaagtttacgatgcaaggtactggcagatactgcgcaaatattagccatatccatcaccgtcactttctcatgcagacgcccaacaagcccccgatgtagtttaactatcaacgctgaagatgaacctacttgtggtagctgagcgagcagcaaacgggcagcatcagcgtgattagccggtggttgcgggtaatcatgtaaccacttaataagagcaagcacagaatcaggtaatggttgccagaaagcatcactatgtaatggattaaacagtgccgaaggcaactccagcaccaattgctgattttcaccactagcgaaaaagctgtgtttcgcatccggtgggatcatcacaacatttccaaaactaacggtacgttgttgtccttctacgtttaactcaagttgcccgttatagccaaaaacgaactgccataacccttggtggctatggctaatagtttcggcagaataccggcgtaaatgtaatgaaggtaattgaacagccatattcattgtcgctgattaaaataaactccattcattcgacaacaaaatagtgtgatttacaataacttatgaccatttgggacaggaagagtaaattctgcgatcaccaccgcaccattttcatccacactgccggtcagcaatacttccgatttgacaccagcaatccgctttggtggaaaattgcacacacaaagaacctgacggccaattaattgttcaggtgtataatgcaccgttatctgggcacttgagcttttaacgcccaattcgccaagatcaatttgtaatttataggcaggtttgctggcttgaggattcaattctactgaaataattgtgccaacccgcatgtcgactttctcaaagtcagtccattcgatcttttccatatattcttctcctttagtgcgaagtcattatacccgtcatctttcaagttgcctctttgttggctgcacttactcaccccggtcacatcgttatctgtgttcccggggattcgctcccttgccatcgcgatccatcttgaaatccatagggtatataatcacatgctaatggaggaaattctttcgaaagagtgtcaatgattatcgacaaactgcctatttttcccgaccagtcattcacttcactgtcgaactgctttaagtcacggttattcccgatcaaaaaagttacttctggtcataccgttattctctttaatacgcgcagtacgctcaagatcctgacggattttctcattgacacgatcattaaactctcggctcttccgattaagttcatcttctttcacctgtcttgccagttcccgcttctccaccgcattattatccgtaatgagtttatccacatcccaatgcttaggttgaagattttcccgtttcttcaaatagtccgcagatggcttattatcagcaggaatatcacttttgtagtcaaaatttgaggcaaatgcctggaaagaaattgcagataaaatgacaaaaatgtaacgcgatcctttactcatcatattgatcccttttcaaaaccataactcagaataattattaaataattatcaccaataagaatcaacaacatttatgtctaacaaaccagtttcaatatcaggtttacactctatttaaattatgtgctttctactgacctgataaagcattaacccgccgggattcgcgggtcaatagtcattagaggttcatcgggaatatacacaattaaatcgtgtttccttgccgataagccagagaaacagccaaagattgcactaaacacaaagtagcagactgagaacggaatgcctccacctgtgcttctttaaccacaaaacaaacatcactaaagctggcaagcgggctaatctggctatctgtaatcacaatctgttttgccccggcttttgccgcccgttcactgaccatcagcgtctcttctgcataaggggtaaaactgattgaaacaacaacatcttcttccccaattaaattaatctgttccctgaacattccccccaaaccatccacgagtaaaggacgacattccagatgattcaatgcataagaaagataagccgccacactaaaagaacgacgcagcccaataatgtaaatattcttagcttgagccaataagtctaccgcgttccttaaatcttcaggggctgttctggcagctaactgttgcatagcctgcacatttgaacgagcaaattcctgcaaaatatgctgagggtcttcaggcggttcctgttcgccatccagttctctaaataatctggcccggtctgcataactggcggtttcttccaccatatgcatacgaaatagctgtttcatttcattaaaaccactgaaatcaaacgcattagcaaaacgaattaatgttgatggaggaacatcagcttctctggcaatcaccgcaacagtatcaaaagcgacactattggtattatccagcacatatcgagctacttgttgcaggcgtttactcaacccactataacgtgaacggacttgttcttgaaattcatttagattcgatgcgacagacataaatcccccataaaatttatcgccagcaattgtaatcgttttaccgtataagctgaatcatatttcatttttatagttaaaaatgaaatacataatccattcattgtaatgatttattattaccactatattgattaacatctaattagtcacctaattatcggtaattcatagaaactttacgccgatcacattaattgccttttgttccaaatcatattgaaaataaaacatatatttcatatatctattatcaaagtttccgattcagtactaacatcaaatccgcaaaagaggctcagaatggaacaggtacagaattatgttaatgggcaacttattcccagttatagcacccgtttttcgccggttttcaatccagcaacaggaaaacagatacgtcaggtagcactaagcacagcccatgaagttgaacaggcaattgaaatcgctcatcaagcttacagagaatggtctaaaatatcaccactgaaacgtgctcgtgtcatgttccagttcaaaacattactggaagctaatatagacaaactggcacgattgatttcagaagaacacggaaaaatctattcagatgctatcggtgaattaactcgtggtctggaagtcgttgagtttgcctgtggcatccctcatctacaaaaaggtgaacattccgcgaataccgggacaggagtggacagccattcattaatgcagcctttaggcgtttgtgttggcattacccctttcaacttcccggcaatggttcctatgtggatgtttcctatcgcattagcgacagggaatactttcgtattgaaaccttcagaaaaagatccctctctcgcgcttgaattagcatcactacttaaacaatccggtttacccaatggcgtatttaatgttatcaacggcgataaagaagccgtcgatatactactaacagatccacacgtgcaagctgtcagctttgtgggttcaacgcctgtcgctgaatatatctacactaccgcctcagctcacgggaaacgctgtcaggcgttgggaggcgcaaaaaatcactgtattctgatgccagatgccgatctcgatatggctagcagtgctattgcaggtgcagcatttggtgcagcaggtgaacgttgcatggcactgtctgttgtattagcgattggggatgaaacggcagatgcattaattgaaaaattacgtcaacagatcaacaaaatatctgtcggtcccggtattgtcgcaactacagaaaacgatatgggtcccgttatctccgcccaacaccaagctaaaatctgtgattacatcgatagtggcgaaaaacagggggccagcttgttaattgatggccgtcaactcaaggttcccggttatgaaaatggctattttattggcccgacgctgttcgataatgtcacgccggagatgaaaatctatcaagaagagatcttcggtcctgttctgtcaattgtccgtgtacccgattatgccaccgcgctaacattaattaactgccatcaatatggtaatggtaccgcgatattcacccgcgacggagaaacagctcgccagtttagcgaagatgtacaagcgggtatggtaggcatcaatattcccattccggtaccaatggccttccacagcttcgggggctggaaacgctcaatttttggcccacttaacgttcacggtaatgatggcgttcgcttctacacccgcatgaaaactgttaccagccgctggccagcaagtatcaggctagaacatcattccagcaattttgtgatgccaacaatggaataaaatggagtcctgtaacatgaacaaatcaacaatgacagcagctcaagcattggtgaaattcctgaaccagcaatatgtggaagcagacggagagcaatacccattcatcagaggaatctttaccatttttggtcacggtaatgttgttggattggggcaagcactggagcaagatcctggtcacttgaccgtttaccaaggatgcaatgagcaaggtatggcccatatcgccacaggttttgctaaacagaaaaagcgcaaacagatttttgccgtaacctcctctgttggccctggctccgccaatatggtaaccgctgcggcaactgccacagctaatcgcattcctctgctgttattacccggtgatctcttcgcctgccgtcaacctgatccagtcttacaacaggttgaacagttccacgaccatactatcagcaccaatgactgtttccgccctgtttctcgttattgggatcgtatctccagaccagaacagctaatgagcgctatgattaatgcgatgcgagttctgaccgatccagccgatactggtgccgtcacaatttgcctaccacaagacgttcaaggcgagatttgggattttcctgactatttcttccaaaaacgaattcaccgcattgaacgccgtcctgcttctgtcgccatgattaacgatgcggtggcactcataaaccgcaagaaaaaacctttacttatctgtggtggtggagtgcgctattcagaagctcataacgcttttcgtcagttcgcagaacacttcaatattccttttgctgaaacacaagcaggtaaaagcaccgtaattgccgaccatccccttaattgtggtggcttaggcacaacaggctgtcttgcggccaacctgatcgccaaagaggccgatttgattattggcgttggcacccggtttactgatttcaccactgcatccaaatcgctatttcagcacccagaagttgaatttctcactatcaatgtagcggaattcgacgcctgcaaactggatgcaatacccgttgtatcagacgcccaagcagggttaaacgctattgcagaacaacttattaaattgaattatcgcagtggttatcaagatgagattcatcaggcacgggaaacatggagaaaagagttaaatcgtctgttcaacattgagtatcaggcagatttcacaccagaaattcccggtcatctcgatgataaattggaagagtacagccaaacattacaaacccgcctgacacaaactagcgtattgggattattagacaaatatcttgagcccgaagcgattattgttggcgcatcaggttccctccctggcgatttacagcgattatggcaacccaaacaaccggatacctatcatcttgagtatggctattcctgtatgggctatgaaatagccgctgctattggcgctaaactagcctgccccaaccaaccggtttatgccatagtcggtgatggcgcttatatgatgcttcattcagagctgcaaaccgcagtacaggaaaatatcaaaatcaccgtgttgctatttgataacgcgggatttggctgcatcaataatctgcaaatgagccaagggatgggcagtttcggaacagaaaatcgttatcgtaacccagaaagcggcaacatggatggcaaactgattaaagtcgacttcgccaaaaatgcagaaagctacggctgcaaaagttaccgagtccacgatgagcaacaactgctttgtgcgttacaggaagcccaaaaacagacggtaccagtactcatagatatcaaagtgttacctaaaacaatgacgcatgattatgaatcatgctggcgagtaggcacagcacaagtagcagaaaacccagcgatagaatctgccgcaaaaaaaataaaggagatggttgcaaccaaagtgcgtcagtactagatgttagtggcctgctatcttgcaggccattttccctttcctcaccgctttcaataccatttttgaaatttttattctggaaataagtgactcttttcctttcattaatctctataaccaagcgtaaccatatagtgagtcgaatgcatattataatttgtttttaaaggacaaattctccactccatccagtatcaatcttactttacgtgatctaattaacacaaattcaatattgttattaacaaaatgctacgccacactcaaaaatataatttccaaatattgataaattgaaataaatgttttatttgatatattttaaagtatctcataagcagatacttaggtatcaaggagcatccatgttcaacattgcattatttggcgctggacgaattgggcaagtacacgcagcaaatatctctcatcataaagaaacttctctttattcggttgtcgatccccatcagaaaagtgctgaacttttagtacagcaataccaaacaaaaagacaaactattgaacaggcaatgtctgaccctcaaatagatggtgttcttattgcctcagcaacagatactcatgcagacctgatcgaactcgcagcaaaacatcataaaaaaatcttctgtgaaaaaccggttcatcttgatattgaacgtgttcgtcagtgccttgcaacgattaaacagtatcaggttcccttatttgttggctttaaccgccgttatgatccgcaattccgccgagtaaaaaccctgtttgacgccggcgcgataggaaaagccgaatctctgctgattatttcccgtgatccctctcctccttctgctgaatatgtcaaaggttctggtggtatgttccgggatatgacaatacatgacttcgatatggcacgtttcattattggtgaggaaccctgctcgatctacgcccaaggcagtaatctggttgatccagcaattgggcaagcgggtgatattgacaccgcctttatcgttatgaaattcccatcaggggcaatggcaaccattaccaatagccgtcgctccgggtacggctatgaccaacggattgaattgcatggtgaaaaagggctgcttagcgccggcaacatcaaagaaaacagcgttgaactctgggaaaacagcggttgtttaacagccaagccagagcatttcttcctgcaacgttaccgggaagcctacattgctgaatgggaccattttgtcgatgtcatggcgggtcgtgccacaccagaatgtaatggcactgatggcgaacaggcactttatctggctgataaagctctcgaatccttacattcaggtaaagaaatcagattataaaacagccctacatttctaactgactcacatttattttcaccctaaaaacgggaaaggccgctttcccgtcagcatattgctgcctgaaaatagtcaatcaggcttggaggatagtatgttagcttttctctcatttattggttttaccttattagtggctggcttcgcttattacaaaacccataatgctcgtctgacagaatccactgaaggctattttcttggcggacgatctctcacaggtgtttatattggtagctctatgttattgatgaacctgtccacagagcatttaatcggtttaaatggattagcattccgaactggctttatcgttatggcttgggaagtgatagccgcggtgacaatcgttctattcgctatctatttcctgcctaaatatctgaaactcggtatttcaaccatcccggaatatcttgaacgccgatttgataaaaatacgctgcttattacctcaattcttttcctggctatgtatatcatttcactactccccattgtgctgtataccggcgcgattgcattggaaagtctatttcaggtttccaatgtattcaggattgataaaactacggcattatggattatggtttggggcgttggtggattaggtgcggtctatgccatctttggcggtattaaagccattgccgccgcggataccattaacggcattggcttaatcgttggtgggttaatggtaaccatttttgctctgctctatgtcggcaatggcaatgcctggcaaggattagttgaagtttatcaatctaatcctgataaatttaactccatcggtagtgaagattctctggttcctttctctacattatttaccggcttaattgtttccaatatgtttttttggtgtaccaatcaatccattgttcagaaggctcttggtgcaaaaaatctcgccgaaggacaaaaaggcgtcatgttgtgtgctttacttaaactcatcatgccgtctattattattttgccaggcattattgctttccatattttcaaaggacaaatagataatccagataacgcttatccagaattagtccatttaattctaccggaaatattggttggtttcttcgccgcggtggtggtcggtgcggtattttccacattcagcggcggacttaattcatctgtaacactgtttatcgtcaatatttacaaaccgcgaatcaaccaaaatgccaccgaaactcaaacagtcgctatgagtaaatatctagggatcgggctagcgttaatcactatgatcgtcgcaccattagtcgctaatgcaccggatggtctgttctatctcattcaacaattacaaggaatttttaacgcgccaattctcagcgtggtattagttggtctgatgaccaaacgagtgccgcctattgccgctaaacttggcctattattcgggatgtctgcctatattatctgtaattttattttaaaaattgacctgcacttttttcatctggttggcattttatttgttctcaatgttattttcatgttggctattggctacttttttccagctaaaccatttgcagatgtttataccgaacaggtaaatattacaccttggtctatggtgaaacccgttgcatggttaattacactatgttcaatctctatatacgtatttcttgcacataacgttcccaaagtaatcatgattatttattacctttctgctgcattaatactatcttatgcgctataccagataggtaaaacgctattcagcaagcttgcaataaatagtacaccaaaaagaacaggtagataaaataaataactgactttattactccaatattattatcagaataactcactgccaggatttccctgcatcccatatttgaaagaggaaatcctggagatttgctaaccaacacacactccatatataccaagccataaatgaaacaaaaattctaatattctattttttctgttcttacctctgaatggtacctaactcattataaaattaaccttatataacgagatgttacctaaaaacccttatcagatcacaacttggaactaatgttttcatttaagttgaaaatgaaacaaatatttcctataacaggtatacgacaataaccaaggctaactggcaaacactaaagaattgactgcaacaatataccctatggatttcaagatgcatcgcgacggcaagggagcgaatccccgggagcacagataacgatgtgaccggggtgagtgagtgcagccaacaaagaggcaacttgaaggataacgggtataaacgacctatccgcttccttctattcggagaaacaactatatggaagagattcgtatcggcctaatcggtactggttacatcggacggacgcatgccattgcttacgcacaagcgccgactgttttccctctggcaggcaaactagtttgtgaaatggtagcggaagtttctgctgaactcgccgcaaaacggtctgagcaattaggtttccggcgttttactgataattggcgcaaattagtatcagatcccgatattcatgttgttgatatctgctcaccaaatttccttcataaagagatggctctcgaagcgatcaaacatggcaagcatgtttattgtgaaaaaccactggcactaaactcacatgatgcaaaattaatggtcgaagccgccaaaaaagccagagtgaaaacattagtcggttttaactatatgaaaaaccctaccgcacaactggctaaagagatcatttcgaatggtgaaataggtgaggttattcacttctacggcactcataacgaagattatatggccgatccattcactcctatccactggcactgtttcaaagataaagctggattaggtgcattaggcgatcttgctgctcatatcatcaatatggcgcagtacctggttggggatatccaaactgtttgcgcagacatgaccactgttatcaaacaacgcccggaaaaaaccggctctagcattatggttgcggtagaaaacgaagatcaagcacatgctatggtacgtttcaacagcggagcaaggggtattattgaaacctcccgtattgcttgcggtcgcaaaatgggtttgagctacaccattacaggaacaaaaggtgctttgagctttacacaagaaagaatggccgaactaaaactttaccgtcacgatgaaccagcaaaccgccaaggctttaaaactattcttattggaccagaacatcctgactatgcgccattctgtctcggtgcaggtcacggcatcggcttcaatgatcaaaaaacagtggaaatcagagacttgatcaatggcatcgccagcaataaagcgatatggccagatttcaccgaaggttggaaagtctcacgtattctggatgccattgctcattcttatcaagagcaacgttgggtgaatgtcactgaaattaattaattatttttatcaatcttccactgtcggagctcatcatagcaacgcttgatgttgtacttaataaggaattgttcaatggagcagcaaaaaaaatttgatgtcatctgcatgggacgaatcgccgttgacctttacggccaacaaatcggagcacgtctggaagacatgggaagttttgcaaaatatcttgggggttcttccggtaatgtcgcctatggtaccgctcgtcaggggcttaaatcctccatgctagccagagtcggtgatgagcatatgggacgtttccttagggaagagttgcaaagtgttggctgtgataccagccatctaaccacggataaagaacgccttacggcactggtgctgctaggaatcaaagataaaaccacttttcccctgatcttctatcgtgataactgcgccgatatggcaattaccggtgatgatttcagtgaagaatacattgcatccgctcgttgtctggctatcaccggaacacatctttctcatcctaacactcgcgatgcggtgctgacggccctcaactacgcccgccgtaaccgtgtgaaaacggtcatggatattgattatcgcccggtactttgggggttaacttctttgggagatggtgaaacacgttatatcacatcggaacaggtaacagctcagctacaggaagtattatcgctatttgacctcattgttggcacagaagaagagttccatattgctggtggttccacagatactatcgaagcactacgcaacattcgtaaactcacatctgctgcattggtttgcaaacggggatcactgggatgctctatttttaccgctgaaatccctaatgatctgaatgacagcatcactatacagggcgtttctgtcgatgtgcttaacgttctcggcgccggggatgcttttatgtccggcctgctacgcggctatctaaataacgaaggttgggaaaaagcctgtacttacgctaatgcctgtggcgcattagttgtttctcgtcatggctgcgcaccggcaatgccagataaaacagagcttgataactatctatcacgcgccaatcaaatactacgccctgatttggatgaaacacttaatcaccttcaccgtatcagcgcccgtaaaaatcaatgggacgaactgtgcgtcatggcatttgatcatcgtattcaatttatcgaattagcccgacaagcaaatgccagtatcaaacgtatttcatcattaaaacaacttctattacgcgccagccgggaagttgccacagaagcagggttacaaggaaaaataggcctgttatgtgacagcacgtttggtcaggatgttttaaacgaaattaccggtcaaggttggtggataggccgcccaattgagctacccggctctcgcccactttgtctggaacatggcaacataggttcccaacttattgactggccactggaacacatcgtcaaatgcctggtgtttttccatccagaagatgctcacccactccgcctggagcaagagaaaaaaattcgggaaatttatgccgcatgctgtaaatctggtcacgaacttttactggaagtgattctacctgcggaaatgaaacactcagatgaattctatattcgcgcacttagacgattttataaccttggcgttaaaccggattggtggaaactcccacctctcagttctgaaagttgggacaacattaactatctcatcgagcagcgagacccctattgccgtggcgtcgttattcttggccttgatgctccacaagaagagctggaaatgggctttaatgccgcagccggcaagtctatcgtcaaaggttttgctgtcggaagaaccctatttggtcaaccatccctaaaatggctaaaaaatgagattgatgataaccgtttgatccagaaaataaaaaccaactatcacaacctgattagcctgtggcgtcagcgcggatagcattattttattcaactaggagcaccatcatggctgttcaacttggtatcaaccctctgacctggactaatgatgatttacccactctcggcgcagatacacctctggaaacctgcttaaccgagggccgccaggcaggttttaccggttttgaattgggcaacaaattccctcgtcaggctaacgtattgggtcccatacttgccgcccacaatctcgtactggtatctggctggtactctggcgaattactcacccgttcagtagcagaagagattaaagcggtacaatctcacctgaccctgctacgcgaattgggagctaatgtcatggtatttgcggaagtgacaaactgcattcacggcgatcaaaataaaccagtccatcttcgtcctcaatttccagctaaccgctggcaagaatacggtgaaaaattgactgaatttgcccgttacacccaagaacaaggtgttcagattgcttatcaccaccatatgggaacggttattgaaactgagaaagatgttgatcatctgatggaaaataccggagatgaagttggattgttgctggataccggtcatttaacctttgccggcgctgatccattggctgttgcagaacgctgggcaaaacgcattaatcatgttcactgtaaagacatccgtcctgacgtactcaacgatataaaaaaccgtaaaaccagtttccttgatgctgtgctgaatggtgtattcacagtaccgggagatggttgtgtggattatccggcaatttttcaagtgttgaaaaaacaaaattataaaggctggctggtagttgaagcagaacaagatcctgctgttgctcacccactgacctacgccacgatgggttataacaatttacgcaaatttgccagagataccggattgttttaattaatcacaatctgattcatgcaaaaatagtactgagggtagataatatgtccaaattattatcaaaatatcatgcaccggatcaaaacaaacgaactcaacatatcacgccggaatcagcaaactggaagtatgtccacttcgatgtttatgagttggcttcgggtgaaaaaatcaccttgcccgcatcagaaaatgaaacctgtctggttttagtggcaggcaaagccacagtgactacgccacatcaacggtttgagcatattggcgatcgcatgcagccatttgaacgcaaaaaaccttatgctgtttacatcactgcgggggaatctgttgaaattattgccgataccgctcttgaactcgcggtatgccaagcaccgggtaaaggaagctacccgactcgactgattacgccacaggatattgatgcagaacaacgtggcaatggctacaaccgacgctatgttcacaacattctaccggataacaaacctgctgatagcttgttggtggttgaagtctttaccgacgaaggctgtaccagttcctaccctagccataaacacgataccgacaatgcgccacaggaaacctatttggaagaaacctattaccatcgcctgaacccttctcaaggattctgcatgcaacgggtctataccgatgaccgttcactggatgaatcaatggctatttacaacaaggatgtggtcatggtccccaaaggctaccacccagtagcaacccttgccggttacgacaactattatctcaacgtaatggccggaccaacccgcaagtggctatttacctgggaaaaagaccatcaatgggttaatagtggagaatatgcacaaaagcataacaattgatgcatatcgagaagaaaataggttgcttttttagcgcactcaatcgagtgcgctgctgcctgtacggcagtgaacgggcacgcaacattagtgacagcttgcgtaattttctaagctgcctgtgcggcagtgaaccagaatcaacaatgttacgttgttcgctaatttttctaagctgcctgtacggcagtgaactggacgttaaagagtcggcagaacacataggttttctaagctgcctgtacggcagtgaacttatctgtgtccggctcttgcgtactcctgattttctaagctgcctgtacggcagtgaacagttgcaatagattactacatgaaacacgacatttctaagctgcctgtacggcagtgaacagcttaccgctgctatctcgccagctatcaactttctaagctgcctgtacggcagtgaactgcataggtgtatgatttatttaaaaataggatttctaagctgcctgtacggcagtgaacagagcttccgagttggggttatctgcgctaattttctaagctgcctgtacggcagtgaacctgttgtcagtaaattggtacaaatgacgtgatttctaagctgcctgtacggcagtgaactcagccgggatacccaccagcacatcgagacctttctaagctgcctgtacggcagtgaactggacactacccgagttggcatctgctcaacatttctaagctgcctgtacggcagtgaactcttgattaatggcgggttagtcccgcttatgtttctaagctgcctgtacggcagtgaacaaagtggataggttttactaacaatccggtattttctaagctgcctgtacggcagtgaacaattgcagcttgagtcgcgttcaaatcgacgatttctaagctgcctgtacggcagtgaactcatgtccatcgtcattggtcattacgtaaattttctaagctgcctgtacggcagtgaacgaacagtaacaataaataatgttttaaatgtttttctaagctgcctgtacggcagtgaacaaacaactagcgctctaaaagatttcggtaaatttctaagctgcctgtacggcagtgaacatgattgaaaatggtgatgaagtcgcattccatttctaagctgcctgtacggcagtgaacgtgggttctattatcggactgtctcatcagcctttctaagctgcctgtacggcagtgaaccgggaggaggaaccggcttcactctttggacatttctaagctgcctgtacggcagtgaacgaagaaactcacaaggatgaagctcttcgatttttctaagctgcctgtacggcagtgaacacgtatttgcagactgaattgttccgcacatctttctaagctgcctgtacggcagtgaacgcatataaaaccaaagggaaatcgtgcccttgtttctaagctgcctgtacggcagtgaactgttagatactacctttaatttactgattattaaagaacataatgataaaaagcagaaaaaccctttttattagcagcggctaatcccttaaataaatcaataagttataattagccgctaaaaaagggtcaaaaccaagggatggtagctgatgaacttaatccatacgagctaaaaattcctgacgtcggtttgtcttgtattggcccttgtttgacaaacaacagaaaactttgacctgatgacaaacttttgagaaacaagaacggtaaatgagtacgttgttctttgctgataggaatacgctgccgagcttgttcccccgttaaccatccctttttaatagcacgacgacgaagtcgttccgcactgcttttaacctgcactcggctgacacagcggtacttagtttcttggggaattggctggatatcaatcacctcagtataatccctgagcccttttaaccacggtaatgcttgtaagtcattcagcgcttcgcttgaaccgtgaattctcagcgtatcccccagtgtttttctcgcacacggaaaactgacaccaacctgcccattacttaactgccccaaagcccgatgcagtttagcaaataacgcttcgaacaggctttgctgactgaattcaagatcaggaagaacgcgaatttcaaggtaataatccatctgatccccttattcacctttttcaccaaaaacaccgccacgaattaacgtcgctataacatagtgttgctgctctacttcttctggcgcttttcctttaacgacccagttatctaacaaagtataaaaatccatttttgctttaggttgacgatatgccttaccacgactagttacagaaccatagggctcaaccgctattgggccaagacccaattccgtagcgtctggataccacgtatcaatagtgcggagcgcattacccactttctgcgaatgcaatgcagcgatctcattgacctgatacaacactttgctttttttactgttactgtcgagaaccaactcctgagaagggaaaatttcctgcccatgccccaaacgaacaaaagcctcaacattgaataatgttgatctatcgcctgccaatccttcctcaatttcggcggcaagttccgctaacttaccttctaccttaccaaattcacgtaagctgaaatcttcacaatcaaactcccaccatttgccactcttaccacttacgcgaactttaatttcttctgctccaacccggttacgccacaaaaaccgtccattagccaagttttctgcataacgtgctgcaagcgttttgaaaccatgttcagcaatataaccgttgatcacgtttgccagttcagcttgataatcctgatcattacatactgatggtgttgaaagattacctaagacccgtaatgtaaaactgacttttagagtatcagcatcaaaaggcaatgcggcaacatcgacacgttgcaggtttgctttttgaatctctgcatccaacttagctggatcgctagttaaagcgtttttcaagcggttggaaatcgtcccccggacagctttttcctgaatagcaataggtttccattcaccgtcgatttgtttccagtttccagcaaacattaaagcatcagaattagaaagtttacgctcaaatgccagtacagaagccgttttaatagttgatttagacatgtagatatccttctttaaattaatcagtcgattattcttactttcttattgggtttggattgacgggaaacagtctgttgattacaacacctgtagacaccctctccttcttgatagtcataacaccagagtaactggcgaatatcgtcaatacggtgcgggcttttccattcacctactccgtagattgcttcaacaaaacaaaatggagcattaggatcacgggttttatctactttcccggcgggatatagcggcgatattgcctgataacctgtcatcaaggggactaaatatcccgaagcaggtttgggaacatactcccaatatgccgggtcaccaatttcaggttgcttatcatcctgcttaggaatagcccgcattttaatagcggaaaaatcaagccaggcgtcaatcatctctgcttgagggttatcctgttttaattcttcgtagtgtttagctaacaattcagagcgatctagcaaggcaaaacccggtaataaacgccgcattaacttacgggtatcctgtccttcttgcggaaaagcaataacatccactttagcaatttcagtgatagtaccgcctgctagtctctgagttggacatatttctagtaaatattgttccaattcgttagcttctgtatcaccagcaatttcaccagaacattctattaataaagaaactgtcatatgcattcgaccttcttcattaatcgttgccgtttttgcttctttggttaacggattgcgagttaatgcaaaaactttatctttaattggatcggaccgatatgcatgaagttgatggttatgacaaattacaccacaattttccagttttagattatagcttttttgtagcttacgtgagatagaatgagtaaatccaagaaagtgggtaattgccggaaaaccataagttatacccgtaatcgcattcgcattttctactttaattttacgcaaaataatcagatggctcatggcataacctccggtaattcatcttcaaattcacgtaaccgctctttaaacacagaagcccactcacgacgttcagataatcccatttctaaccgctcatgctttaaactctgattcagccagtaactaaaatctgcggctatctcttttttccagtcaccaccttcgcgttcaaatttaaacgtttcatcttgctgacaacgataaggatcaagccagagttgttgagcacgttttaacgcacaatcttcattggcactccagcctttaagctcaatcaaattttgtataccgacgacatagttaaacaaaacatcaataatttcatcaacatattcctgacgacattgctgaatctctaacgtgttttcatatttttgtacactcaacaaataccgttgcatctgccaaacagtgctacggactaatgatacaaattcacagcccagatcaaaaatagatctgtgcttcataggtggtttagttatatttttccattcaggggctgaacatggtagaagataaactcgtccaccccgcatattgttaagataagaggtaatttgtggcttagtgctgccaaaatactgcacagcagtattgggataaaccacgatagtttcaggacgccaagattcttcttttctcgctttgttaatttctttagataattcaccaaagcgtgcttcagtaatacgctgatgcatggtatgcgctagagatgaagaaaatagtgggcctaataagtggtatttatcatagccgacaggaaaataaagctgttttgctagtctatgtgaagaaagtcgtttatctgataaaacttgcctaaacccattgatccataattcaagctgctgctcatttttcgccagttcagctagtgctgaatagtctgcccgatttatatttgcaagcaatgaatcaccttcccgatattctgtcaataataatttcgcaatatcaagagcagccgcatttcctgccgcatctatagcaggtctatctaaagctgccatggaaagatatttaatatcttcttttacatttgcttttgattgtaccgcgaaaatactgctacctcttgcatcagtatgggcaaatttcagaacatgtgtcactaagcggatttgatctactcggctaactgcatcatccagccaatttctaacttcatagtgctcttccaattccttgcgttgttcagctaacttttgtttaactggcgtaatatcctccatagaggttagttttgccaattttttttcagcctctttatcaaaaacctccaactttgactgtttacggctttcaatataatcgacaataaatcgactcaatccattttcattcataggctcttacctaccttatcaaaatgattatctggttgtctgctaaatttagctcgaaaacatgatcttgtacatcataaactaataaatactccagctttgaattcatcaccctaaccagtgtattttaatttattccgttcattcgctttaccaaaattttgcctctgtgtatttcacaacaaaatacctaaaaatcatcctattttcacccaaaattattacagtggtaatgagaaatagggtatcaatcaagtcacggtattaagcttgtttcttctgccaattcaagatgaatatatccatgaaacatctcatcaccaatgacatattcattagacagtttatttctttaaatgttcaatgtatctttaaaaaaataatctccctcctttaagtgcttttgaagggtaatccgcaattttatatagaattttcatagtacagctcgttataaataggctcaatacaaaatacaggcgttatccataggcattaaactcagacgaacataaaattcttcgatttccgtacgtgataacaggcaaatacatttagtattttccacctctagtctcgattcaaaacaatcaatcacattaaatcacttctcgctcgaatcagtggatttcgatcagatctctttggacatccggtgttaaacgatagagaatcgacattagtcgtatttacctgtctctagttcatcaaaaaacgattcaccatcaactaggttaccttcttcaatatcagctttggtttggattgctctggatttcaaaagctgaatcttaagcgcttcaatgttttcatattcatctattgataggacaacagcaacaagcttgccgttcttattaatctggattggagcacgctgcgctcttagcagcatatcaccaaagtgagttttaacttcattggcagaaagttcatacatatttgtagtctcacaaatatcgttcgattcgcttagtttgattgaatcgaacgacaatcaccacgatcattacctaaaaacactgcatgtcattcaaccaatttctccaaacacccctaaaaatggatggtaacgccatgcttctccgtcatctttcttcctaagacgaatctcaccaaaatgttggcttacattttttaactccatttcatttgtatcagccaaattctggtaaatcgtctcagtatcaagttcaatccaagcactcacaccaagtgcaaactctaattctggcacatagtcaaacgtgtcgctttcttttatccctgcctgaccgctgtccagagccacaaacttcgcttcttcaccctcttctccaagccacaaataatgtagttcatcaggttctgattgacgaaatggtttatggcgttgtaattctgcacaccatgaagcctgttctcgccaccaaagagctgagcagtaaccgtgtttattatcagagccaccttgaagttcttcccataaacgttgatgttcaagatcgaccaaattttcaaaaggtgaactatctccagcattatcgcgttcctttattctcggcaatgcactgattagttcatattgataaggttccagtaattcatgtaaatcatgattagcaaaaagataatctttcgactcaaaccctgggcgacaataaaccggatgttttaaatcagtcgctttaagtgccttatagtttttcgccagaatatgcagattaggctcccgtggttcttttcgtcgatgacgttgaatacgtccggcaagttgtatcaatgaacgcattgagctgggttcagctatactccaatcgtaatcatgatctcggccaacttcagctacagaagttgccgctactacaaaaatatgatccctttccgatgtctcttctaatactttgcgaatttccgccacctgccacaactcttcttcatcgtatcgtgttaatgtggaatccagccgatgttcaagatgagaacgtatcgccataggatgttgactgtgataaacgcaataatggatgcgcacattttcaggagatggcatttgtaataaccgctgtgcaacagcaaccaatggatcaatatttgccatacggattaaaccaatagagacggttttacccgatgaatgagtttgatgatgctcctcacgcaacttcaatatagagtgatgcatcacttcggcgatagtattaataacatcattaatcttacgactttcagaaataatcggcacaagttcagctttacgcaatggcactatttttttaagcctgccaatacgcttattaacgaaaatattatgctgttcctgaaactgatatgcattgaccacatcctgttgcgttgtttcatattcatcaaaccaagcacaacagatattcaccggagcaccaggttgaccacatgctaattgataatcttggcgtccggcacgataagcattgaacaatgcctgaatcaacgcaggtggtaatgtggcagatgaaagcaatacccgcgaacctaataatcctgcccagttcactaatcggcataaagccgacaaatcgttaatatcaaaatcatcaggctcatctaacacgagatcagaagtgagtaacctcaacataggtgcaatttgctttccaccacgaataccttctgtagctggaattaaatggtcgatggtcgccaccagtacaggtgcgctaagcagcttattaagtttattatctttacgtaaccaatgactcagacgcccatcatctaagctaccgtcataactaacatactggtgttcagcaaataacgcttccgcggatatgctgcccacatcaggctcaagcgccttttggcggagttgatgtaattctttcactgcctgcgagccaatcagtaccgctaaatcatcttcttctaaatgcaatcttttacgtaacgcatcaccggtttgtaacgttaacgttcttaaccccaaagcgatagagaaacggcatccttgtttttcatcagctaatccatacatgatgcgtgcattagcaaaagttttaccacaaccagtagaagccatattaatgccaaaaaagccctgttctactgaacgttcgcgtaaagcacatgcgacatagaacgcctgatcctgccaacggtatttttcatctttactgcgttgtttaaatcctttatgccgggtaatcgcaggcagcgttttacgaatatgtggcaaacttctccccagtagtaaagcattctgtccaacaccaatattgtgctcatctaatcgctgcttgcacttaccggtggttctatcagtattggcaaataccccatagttaacatcctgccaacccaaagttgcaggtaacgatgaataatgatgatcggccagcattaaaaccagtcgagacatatgactggtgaaacgctggttcagattgccatattgcactaatgacgttgattgcagcgctctttgcgcaaatttttgtgctttctgacgccaagtctgactacggataggtgtaccatttgggaatgtccagacatcacgtttatcctgatcactccagaccttattatccatgttgattgagttccatgacggttctaagtggttaatcagccaactatcaatatcttttaattgtggtctgcgtacatatcgatcgtcataactaggataaacaggaagacgatgatgagagaggattagccaagcgacagtggttgccaatggcggtaagttaacaaaagggtttgcatattttttatcgatatcatccttaaccaaacgggaaagaatcttatcctcatcactaggctcaatctgactcaacgaagtcatccactccctatcatcttgttccgcaacaaatgcctgaaacagccgcaaagacacccattcatgtcggtacggttgaaaccgcccattaccctgtaaaccttgctggaataatgtattagctttaccaaaatcatgaaataacccggcaatcgctgccaataagctgatagcctctacactatgccaatgattttcatcctgacttttcagcacatcacgttgtgttgtatttgtaggtacaactcctcgtgagttaaagcgccgcaaattcccgactatccataacagctcagtttgaccaccactttttatccaatggcaagccaccgccgtattacgacgtgccgttttacgcaataacttacgcaaagtatttaaaccttcctgggtgatagccgtttgccaagttctatcacctttacgttcagcaaattgatccaaaattcggcgggtttctgttagcgctcgtttattacactgggaaactaagagaatattcatcgtgccacctgactcaattgttgcgcagttgtttgtagtgcctcaatcatggtgtctaaagcatcagctttttgaaatccactaatacagcgttggcgaaactcctgttcatcttctccagccattgccgcttctaagctgcctgtacggcagtgcactcattcatattaccgaagtgatcgggatgctttttctaagctgcctgtacggcagtgcacatattggtggaggacatgttggttttgttgtttttctaagctgcctgtacggcagtgcactgttacatattaactttaacctgctgatttttaaatagcataactactaaaaagtgaaaaaccctttttataagagataattaatttatccataaaatcaataaattacaactcccttcaaaaaaagggtaaaaataaggtagcagcaaaaataccatcacatacttaagtcatctgttctaagcctaagatctatgcagtaagtgagaattgttgcctgtaaaatgttcaatgatactggaaccattcactgaattcggtcatcgacaaaaatcagtacctcttaatctcacagcccctttcaatagtgacatcatccaatattccaacagtttcattaatttcaccatgtacttaaatattgaaaaattcagtattacccaatttaacaagtatccaattcatattttcagaaatataattagcttaattaaagatataatctatattacatgttattatgagagcaaatataaacattacagataaaaaatgattctttattattagctaataatcctataatgactcacctccagaatatacatctattatatcaatcatttacataaaccatttcagcaaccactcccatcattaaataaaaacatcaggttgttttctcatatatctaatattccattccatctgaacaatggtggattatctctataattaaggaaatgccctgaaaatatcagagcattttttaagttaaacgcattgcttactattagcgccgtagttatggtgtaagaaaatatcatgttacgaagataatcgttgtcaactttattatcaatgatttcaccggtctcaagaatcaatcgatgagttggttcttttgagcaaagaatcatgagccgcattttatcttttataagccagcgatcattgctcgcaggactaaaccagtgagatttgagcaagatattaccctgactatcacaaggcatttcattaaatttcaccgtccagttagcatcaacttccgtttttttattgatagtcccgttctcaccttgaatatcaacagaaccataaaataagaagtcaccatcaacaaggtgaactttaccgttactcccagaatatcctaacccaatatttttagggatattcactaacgtttgatattgaacacctttaactgaatacatcatgtttcaatctcctttcgttatatacccgttatctttcaagttacctctttgttggctgcactcactcgccccagtcacatagttatctatgctcccggggattcgctcccttgccgtcgcgatgcatcttgaaatccgtagggtatagctactgtataaaaatagaatttaaccactctggatttaactatacccaagaaacttcaagatgcagtttttagcacctgaaaatggtcgttaattctagacatcagcgagtccgctatatccggtagcgttgtggtgaaaaatttgaagacgttgtctcgaaattcatgtttatccgcgaaataacggttatttcgaacctgttcattcatgaccttccataatcgttctatcgggtttaaatttggactatagggaggaaggtaatgtaactcaatattgctaacataagcccactccttcacaagatgagctttgttgtaacccgctccatccacaataaggtgaattttttgatgatagtcaggataagactttcttatttcattgaaaaaacagcaaatgttgtagtcgttgatggtctgatattcctggaacaccgtacgaccaatggcattcaggttgagggcacccaatatattcaggcgagtccggcttcctgttgttttgacggtttttttctcgccttttcgcatccagccataactgagtttggtgccttgagtcgggtgaacagcatcaagaaaaaggatgggttcgtctttcgctgtgactttaagattctcataatattcaataaattgtcgctgtttttctgcgtcgaatttatgagggacgccacaaggttttttataagaaaaaccctgacggtgtagccatttattcatgccgggaatgctaaaggtaatattccagagctgagcaacataggccacgatttcatgggtgtgatggaaaagatgttgagataagtgattgattaaaaaatcagtttgttctcgggaaagcaaactatcagaccctccattatcagatttaagtttaccttgattaaggtaatcactgatatggcggtcaacggtggtctgatggagtcgcaatgcctgggctatcatcacagaactccacccttcagaagccagaaggatcgcttttattctgtctcgtacctgaccatcacgagtggtgtcgtgaagacgttcaagtttgattttttgttctgatgtaataaatattttcatagcgaggataatgatctccatttcggataaaatcaagcatcttcaatgattacgggtataacatatgcaatattattattctataaataatttcatatttctttaaataatccattggatattttgccatccaatattcttcacggtcaattattcaatctatttataactaaattcacctatcaatcaaaaactttattaaagtctgatattttaaaaatgtgattttaaataatctatattattgcaggtgaaaaccatttaaataaatccatttttatgtaaaaatcaaattaataatttatatttaaaaaatcacaagaccttatttttaattctaaaaaaccacatacattccaattaaaaaataatcacggtactcttttcaatattatttgaaatttacctaacataaggattaatagaattaacggttatcaagcatcaatttgtcattattgttcattatgaggtaattcaatacctttggatacaatgttcatattccactattaaattatttaattaaaagctaatcaattaagccaccaaatattatatttgcaaactactgaatatatttcacatccaattactttactaaaccattttcacatcactaataaacataagcatttaaccactcataataaatattgattttacagataaaaccgcttgtaatacattcagccaaataactataatgataaagaaataatagaataaagattatatataaaaactccggtaaaacttttgaaacttacaatgatagtgaatttggtatccctaccttacccaagacgcatttctgcaaactttaggtctaaatttacatcaagttgacgaagacgtatcagcgcttcaaccctattggttgttttaagagattgaactatttcagatttgctacaaacttgtaccaaatcagcaggtattctccggcggaaataatacattagcccacgacgataaagatgagtacacatacgaatgaattctccagcaccgttggaacgatgtggtacactcatgtgcaacagtaaggtgtgaatcttaggaaaattgtttataaacataaagttagaaagaattggcggaggaggagagattcgaactctcggatggtttcccatcggcggttttcaagaccgctgccttaagccgctcggccacccctccgcaatggcgtgcactataaacagcaccgagacagatgtaaagtatccttctgttcgattgccgtaaatttacccttttttatggttgttggcttactttatcgtcacatgtgcataccattcttgggtatggaagtgatttttgctaaattacggctacttttctttaatggttattaatgattatgctggtattcgaaggtcaagaaatcgaaaccgatgcgcaaggttatctgaaaaacagtagtgactgggaggaagcaatagctttacttctcgccaaacaggaagaaatcactttgactgaaccgcattgggaagtcattcgttttatccgggaattttataaggaatttaatacatccccagctatccgtatgttagtaaaagcgatcgcacaaaagtatggcgaagaaaaaggcaacagccgctatctttaccgtctgtttcccaaagggccagcaaaacaggcaactaagatcgccgggctaccgaaaccggtaaagtgtatctaatcaataaactagctcagtggcggacaataaaatctgcaatatcctccactgcgcaggattgagatgaaaagttatctattcgtgctcctggaggaccaccctgctccaaccaatgggttaatgtatttagttgttcactatcaccataagctacgattttgacactaccgtcatgcaaattacagacataacctgtcagcctattaagtttcgcccaacgaaaagtttgatagcgaaatccaactccctgaacccggccataaacataaattgttaccccatatttaatcataattaccccctaatcaaccagtcaccttgcggtatcgctcacatatatagttaagcacacgactcttggttgtgttttatatttactacagctaacctgaaaatagatgaagccacatttgcaatttaaaacaaaaaatggcttcaactaccgggtacagctcttgtaattcaccttactgcccttatatcaatgtcaatacaagacttctttggaggtgactatgattatcgccagcaaattcggtatcggccaacaagtacgtcacaaacttctgggttatttgggagtcatcgtggatattgatgtggaatactcgctggaacaaccccaagaggatgacattgcatccaatgctaccctgcgttccgccccctggtatcacgttgtgatggaagatgacaatggtcaacctgtacatacttatctggccgaagcacaattagcctatgaaacatccgatgaacatccagagcaaccttctctcgatgagctagcagaatccatccgccatcaactactggccccaagactgcgcaattaacctccaatattatacctaacaacctaaggcagttatcgcgcttctaagctgcctgtacggcagtgcacctgatgcaattactgatagcgaccggggattttttctaagctgcctgtacggcagtgcacaccactttgtcgctttccgcaaggtgcatacttttctaagctgcctgtacggcagtgcacccatcccacgttgtggcgcatgtgggccaagatttctaagctgcctgtacggcagtgcacttctagataatgcagcatatcccaacatagtatttctaagctgcctgtacggcagtgcacgaaatattgtaagagaaacgattaatttcatttttctaagctgcctgtacggcagtgcacgcggcacaacagcggttattgatacagagaaatttctaagctgcctgtacggcagtgcactgatcgctatctaatcgtcttactctcatttttttctaagctgcctgtacggcagtgcacatgacctggattttattatcgaactgacgtgttttctaagctgcctgtacggcagtgcacacttgccacagcaacagcttgctgatgtgttatttctaagctgcctgtacggcagtgcacgtttgccattgaagcgcaatgtcattcatctctttctaagctgcctgtacggcagtgcacttctatcagtgcagaactcgccgcctatgtaatttctaagctgcctgtacggcagtgcacttaaagctgaatcagggatcgggcgctacctttctaagctgcctgtacggcagtgcacaatcgtcaacgggcttaatgttgatggatgcatttctaagctgcctgtacggcagtgcacacacttaatgagaggacccaaggagcacgtcttttctaagctgcctgtacggcagtgcacaagagcggcagaccgatacttcgtttgtttactttctaagctgcctgtacggcagtgcacgtacggatagcgatactgactggagtttgatttttctaagctgcctgtacggcagtgcactaactgaggtttaccctttggtccactccctttttctaagctgcctgtacggcagtgcacggtaacgaaaatagctacctgtggacgtatcatttctaagctgcctgtacggcagtgcggctttccttgcctgttcgttgctgtgctttgattttctaagctgcctgtacggcagtgcacattaaatagtgcagtacaacgtacagcggaaatttctaagctgcctgtacggcagtgcacctcaatcattagaagcatggggttatcgtttatttctaagctgcctgtacggcagtgcactatctaaacggggattcgatgcttggtatgcgtttctaagctgcctgtacggcagtgcactacattcttctcctttgtaagcactacttgattttctaagctgcctgtacggcagtgcacagaaggttacggtaacgaaaatagttacttgttttctaagctgcctgtacggcagtgcactgttacatattaaccttaagttgctgactgttaaagaatatagtgataaaaaattaaaaaacccttttttcaggagatgttttatttttcttttaaattaataggttgttttttgatgataaaaaagggtcaaaactagggcacaacaaaagcaccatatcttatagcaataaaagtgtagattctggcaaaatttagcagcaataagagcaactaaattttccttaagatattgtaataactgtaaaaatagattttataagatgtctagaaaagtaaactcaatatccaactcaaacattattttgaacacttggaacccggacaccgcttctcatccaacgccttaagtttacattagatattggtgccagggtcccttcatccactaattagaaaccaaataactacaagctgaaaaatattatttttcgagtcccaatcttggaatttcaatttttgggcagcgatccatcacaacatccagacctgcttcctctgccaatatttttgcttgctcattaataacaccaagttgcaaccagagcacttttgctttgatatctatagcttctcgcgcaatgtcatatgcagcgtcagcattacggaatacatcaaccatatcaacagcctgtggaatatctgccagttgtgcatacacccgttgcccaagcagtgtttgtccggcaagcttcgggctgacaggaatcacctgatagccttgttccagtaaataagccataactttataacttggacgagcagttttttcactcgcacctaccaatgcgatagtttttactcgttttagtatgtctgcaattttctggtcactcattcgctcctccttaaattcgatatttttactttgtttatttattacaatgtatatgataaacattgttatcaattgagttcactgcattcgaaaacacaataacgattaccaaaggcatcctcatggaattgacaacccgcacaatggcaaccgctaaaaatatagcgcttattgcacatgaccactgtaaaacttcgctgctagcttggtccaaaaaacataaaagtttactcaagaaacatcatttatacgctaccggcacaaccggtaatctgattcagaacgaaaccggattatctgttaccaatatgcttagtggtccaatgggtggagatcaacaaattggttctctaatctcagaagggaaaattgatgtgttgatatttttctgggacccacttaattccgtgcctcatgatcctgatgtaaaagcacttctacgccttgctacagtatggaatatccctgttgcaactaatctagcgtctgcggattttattgttagttctcctctattttctgaatcagtagatattcaagtacctgattatcaacattatctgaatggacgtctgaaataagtctttacaacatatacctacaactacacgtttctccacgtcaaataccaggaaaaaacagagtgggatttccaagaaaggtatcccatgatagccctgaatatttcagccaacgcaaaaccttaaggtttacgttgaacaggcacacttaactgctctaactgacgtacaaacaccgatggattattcttgtcttgcatcaaccacacctgcttcttcgcccgtgttaatgcaacatacaaaagacgacgctcctccgcatccgaaaaatcttccggctgtggcaataaaacccactccatcacagattcccttgctggtgcaggaaaaccatcttgcccctgatgcagaccaagaataatcacataatccgcttgctgtcctttagaagcatggatagtcataaattctattttcaatttaggccagcgagttgctgcttttttcagtaattcaggtttcaaatagtgataacgcgccagcaataaaatcgtttcttgctcagtgacatagccactcattttatttaacaaaggttcaagctggtcttctggcaggataacaattgattttttattacctttagtcaaaccatttagtgatttccttaactgatttggattttgttgcacaaacgcgttagtaatcttactaatcctatcattaagccgataagagatatccagtacacattcagcacctttgccaaagtaattagcaaatgcgctagtcaacatccgttccgcgccactaaaacgataaattgcctgccagtcatcccctacggcaaatagacagctttggctattttgggttcgcattgcagtgagcaatttggcccataatggtgaaatatcctgaaactcatcgaccaaaatatgcttccacgggctgataaaccgccctttatccagaatattcactgcctgatggattaaccctgagtaatcaacagcaccttctgttttcaattcagatttccacgcctttaataaaggctccatcaagcgaatacatttttgaaaccgatccagatactcttcctgaacttgctctatcattgctttctgactaccaccatgcatacgcatcaaccccagccagcactcaagccgatttgacaggcggttagcaagctgttcatcgtgccaaaattcaccttccggcacttcccatttcaactcatctgtcagccattcccgccaacctttggcctgtgctttcttctcgctacattgttgttgccagtgtttaatcagaaagtcttttcttttttgtccatctgtttccaatacgctgatttttggcgctttattactcccttgctgaatgatatgcaacgccaaagtatgaaacgtttttactttaatatcattcacaccaagacgactctgaatcctctcattcatctcattgacggcttgatgactaaaggctaacaataatatctgttcaggaatcgcctgttggagaagtaataaccaacccgctctcgctactaacaccgatgtttttccactacccgcgccagcaagaaccagaactgaattttcaccattaataacagccagactctgagaacggtttaaaggagatgcttctatccgctgaaaaaagtcacagtgttgctccaacatacgttctgtccattgcagattgattttttcaacacacttttcgccattctcaagccaacgcaaacaaatttgatacccatcccggcaatgatcaaattgttccagacgctgtaatggcaacggtaaagcctgaaatgttgcttgaatttgttgttgtaattggagtaaatcagcttttttcaaccaacgattctgttgtccaattctgttgatttcactaacctgagctgtcagtacattcgcactaatatcactcatttcctggctccatttctgccattcaccaagcagataatggtaaaaacgctgagtttgctgccattcagtaccatgaaggcgaaccgcttgtccatcggatagttcaaactctaactcaccccagatgataccccgtttacactgaatattaattaactggttaaatgggatcaggtattgatgcttttcaccactgacttcaatacccgcattcagcaagcgcacccgattataaggatgctgagcaaggcattggccaatttgtgttgctttaagttccattatcgagcgccgtacctaaaaaatagttaaattatgtcttataagagttttttatcactaataaaccttttatcataatatacccgttatctttcaagttacctctttgttggctgcactcgctcaccccggtcacagagttcgctatgcatcttgaaatccgtagggtatcgttatttatgaccattattattacctcagaggtattttgtgctaactgctttctctggtctacgccgttttctttataacagtcattttctctactataaccgtatcctaatcgccttggctggaacaacactagtgccttggtttctggataaagaacctaaaataactatctcattgaccttgggcgttgttgccgcagcactcgctgatcttgatgatcgtctgactggtcgtttacgtaatctagtgattacgctaatctctttctttatcgcttcagtctctattgaattactgttcccttatccctggctttttaccattggactggcgttatccacttgcagttttatcttactgggagctctcggacaacgttatgccactattgcatttggtgcgttgctgatcgcaatttataccatgcttggctcatctattttcccactatggtatcaacaacccctattactgctgacaggtgcaatctggtataacctgttaactctaacgggccatttactgttccctattcgcccattacaagacaatctagcacgttgttaccaacaacttgcagtttaccttgatgctaaagctaatctgtttgatcccgatataatagaagaaggataccagcaatctgtcgttaatgtagcaatggcaaacagtgtcttagttaacacgctaaatcaagccaaaacctccctactgacccgtctgaaaggcgataaccgccaacgcggaactcaccacactctgcattattactttgttgcacaagatattcacgaacgggcaagttcatctcatgtgcaatatcagagcctattacatactttccgttacagcgatattctgttccgctttcaacgtcttctctctgtgcaagcccgtgtatgcgaacagattgctcaatcgatactttggcacaaaccataccagcacaatccgcgtatcgaacgtgcatttaactatttggaaagttccctgcaacaactcagtcaacaacagaaacataacctcaagattaccgccttatataatttgctgaaaaacctacgcgcgattgatgcacaattagcaagtatgagttctggacgatacaatctttccaaagacagagaagatgagactcaactatctgacgaaacgttgactggctggcgtgatatctgtctaaggctcaaccatcatctaaccccacaatcagccctgttccgccatgcaatccgtatgtctgttctgctatgtagtggctacaccatgatccagtggttagatttacaacatgggtattggattttactaaccagtttatttgtttgccaacccaactacagcgctactcgccgccgtttaacactgagaataataggaaccgttgccggcgtattgatcggcttaccaatcctttactttgtgccatccattgaggggcaactggtgttaattgtcatttctggtgtattgttcttcgtcttccgtaacacccaatatgcacatgcaaccctgtttatcacattactggtattattatgcttcaatttgttaggtgaaggctttgacgtcgcattaccaagaattattgatacattaattggttgtggtagcgcctggttagccgtaaatttcatttggccagactggaaattccgccagttatcacaagtgataaaccggacgatgaataccaactgtcgctaccttgatgccattttagttcaatattatcagggaaaagataatggattgacctatcgaattgcccgccgtgatgcccataatagtgatgcagaactggtatccgctatttcaaacatgtctgccgagccgaaaagtgaccaaacttctcaagaaaaagcattccagctattgtgcctaaatcacaccatgctaagttacatctctgcgctgggagcacatcgagataaattggataataaagctattctggatattcttaatgatgccgtttgttatgtcgatacagcattaaaatcgatattaatagacgatgatagaattaagcaaatacctgtcaacatagtgaaaagaattgagcaagcgccggcagaaagaaatagtaaagagcaactggtattgcaacaaatcagtttattaatagaattgctacctaaaatcaccaatatcattaaacaaattaatcaattataaccagattgacatactggggcagttgactgccccttcttttagctgttcacgataaagatctaacaagccaattctttgtgccagcgtaataaatcattacggatctgtaccggtaaaacggctgaatggcatccttcaattgcaccagccaaagcaagtaacaaactaacattagaatttcttttatattgatgcagttttaaataactggctttcgcacctaacaaccgcaaatcttcaactttacatattccgactttccataactgacgttccaaagacattccaagattaggcaaatccttcaaacgctctggtatcttctttttacccgccatttcaataaatgagtaatgataagccaaatacgcatattgagataacaactcttgatcttgccaaagtgactcaacaacttgataataacgcaaagttacaggcaccccttttttcgagtaaatatagtttttcattcctctggctttaaataatacttcagcatggccatttcctcttaaatataattctccatcagcaataatagcgaacataatcccatcagctaacaggctgtaaccgccgaactgtggcttccttgtcagtgccccaaacgaagaaaaaccatttttgagttgagtaaaacgtacctcagacaaaaacatacagatcactccatgagttttgtgcaaataaatctcttatccatagatttgttccagttattagtaaaataaataacaggaacaagcaattaaaaacatacgcaatccaattttatctgccaatggttaaatgagtttacagccatttacagtcaatatttgcgaagctctttgaaaaaatagacttgatcttagcttggcatgaagatactgtatattaatacagttaattatggcgaggttcatttatgggcattcaatcatcctggttttactcttctaaacatcagtcagccaaaagagagggtatggtgaaagagggtaaaggaggtatagtgagtgaattgatttatagtaataaccaatatagtgataaccaatatagcgataaccaagcggtcattaatcgtatattgctacctttgttacgccaatctggaaatgaagcccgctggttgctatgggttagtccacataaaaaactgagccgccaatggttaattaactctggattacctttagataagattatccaattaaatcgcatgagctccattacaacggtagaagcaatggaaagagcattggcgagtggtaattacagcgtggtgcttggctggttaccaacgttatcgggaaaagataccgtgagattacaggctgcggcacaaaaaggtaatgcactaggctttattatgcgcccacaagatgtaagtaaagaaactagccgtgctgaatcgcgatcggatttactaaaaatccactccattcactaccattgactaaaaccaagcattatcgcaatattcataacacaaaatagccaattcagaccaagaaccactgatcacaattaaaatcaattaattaaggtaagatcagttgtaaagaatagtaaagtttttttgaaatcatacattatcttttaaattttttactctattaatcaaggggcacttgtaactttttaacttcgttgtagactttacaccattaaaggttactgcacttactacctttgtattgtttagtccatcggttttatggaagtgcagtattcctaactgagttctttaatcaatatggctcaacagcctatcttagtagatattaaaagatacgataccctatagatttcaagatgcatcgcgacggcaagggagtgaatccccgggagcatagataactatgtgactggggtgagcgagtgcagccaacaaagaggcaacttgaaagatgacgggtataaattagtgcgggccattcttatgggtaaacagtgaacacggaaatgcgtaaaattcaaagcgtacacacaataacggtaccgaagaatttgaacacaactcagtgttcgcttttattacaaagaatggcaaatgaaatagcctaatggggtaggcagtaagtaaaaaggctcccaaagccaattgcctattgggtgatgataataacgaggcgttaaaatgaaaaagatagctatcgcggtagcagtggcagtggccgctttcacaactgcaacgcaagcagctccaaaagacaacacttggtataccggtggtaagttgggttggtcccaataccatgacgtgaatttctacggtaacggttataccagtgcaatcggtaatggccctactcacaaaaaccaattgggtgcgggtgctttcttaggttatcaagccaatccgtacctaggttttgaaataggttacgactggttaggccgtatgccttacaaaggcagcgtcaataatggtgccttcaaagcccacggtttccaaatggcaaccaaactgagctatccaattatggatgacttggatatctatactcgcctgggtggtatggtttggcgggcagattccaaagcaacttatagcgcaaccaatactcatctgaaaaatcatgataccggtgtttctccactggcagctatcggtgttgagtatgcgataactaaagactgggctactcgtctggattaccagtgggttaacaatatcggggatgcaggttcagtaggtgcacgtcctgataacggtctgttgagcgtaggtgtttcttaccgcttcggccaagatgaagcagcagccccaattgttgctccagctccggttgttgctccaacaccagctccagcacccgttgttgaaaataaacgttttaccctgcgttctgatgtgctgttcgaatttgcaagttctgagctgaaagccgaaggtaagcacaatctggatcaactctatactgagttagcaaatatcgacccaaatcagggcaaagtactggttttaggctacaccgaccgtatcggtaaagatgtttacaatcagaaactgtctcagaaacgcgctcaaagtgtagttgactatctggtatctaaaggtatcccttccggcagcatcagcgcggaaggtcacggtaaagcaaacccagtcactggttctacctgtgataaggttcacaaacctaacctaatcaactgcctggcaccagatcgtcgcgtagagatcgaaattcaaggtactaaagaggttgttactcaagcacaatctcaatctgctcaataatagcctttcttggttatcattaatcattaaaagctcagaaagccccatcgtcagactggggttttcttttaccgatagtgaaattttatatcaaacttattaagaagcttgtggcgataccagcctataacaacctatcacaactgaaattactctttcttacccagaatagcttccaagtcgtgtttcaagctggacatctgattggcatacttttctttccgctcagcatcttcaattaactggataatagtttcagacagtgtattaccccgtcgctgagaaagtgcagataagcgatgccacacaggaaaatctaagtcgatggatttcttgcgagtatgctgatgttccgcattaaaatgccgtttacgccgagcgcggatagtttgtttcatccggttggataaatcaggattcatatgctgctcaatccatttcagtacccttaccggttcactctcaagttcaatgagtttatcaacggctgcatgagctgcactgttttcaatatatttagtaattagctcgccttcttgatgttttttcatcagataagtccacttccagccacattccaaattttccagttgttgatatttcatcttactttctcagtgacagcgtaactaaaaataagcataacaactattttagtaaattgcttatagccaaactgattaatatccgttttttgaaaaaattattttttacataaagtgtctgcaatagcaaacattcaagcatgttggtttatatcttaatcttgtataatcgacgctttcctactttacaacatacagcgatcactttgaccactaacaaactagactggcaggcattactgccgaattgcgttccttatgatgcgctttttcattctgcttcccaacaggcgtctgccagcatggaagccgttcaatcacggctacatagtggtttacagcttttttgccggatggattcccgccagccttttatgctattgaaagccgaagaatgtgatatttatttgtcagcattagctgagtctatccgtccattactcacgaaagagcttccccaaattggtggcaattatcacatacagcaacagaaaattagctggcaaccctcaacagcaggccatttcacacctgagttacgcgtcgcctatcgtgaatggatagaagcagagcaattatttggccgcttccattctcacaacggagaaattcacttacaacccggtctgattcatcaggtaaatggcggtgtacttattctaccgttacgtaccctactgtctcagcccttaatgtgggttcgcctgaaacagatgattattcagcaacgctttgaatggttgtctccggatagcaacaaaccgttaccattacctatcccttctatgccattaaagctacgtctgatcctggttggagatcgtctaagccttgaagagtttcaggctacagaacctgaattagcaaaaagcgctctatatggcgaatttgagctagatatgccatttcataatgagcaggatttaagcctgtggtgcaattatatcaatgggctcattcaacaatggcaattacctccattgcatcataatgcttggcctgagcttgtccaacaagcaacccgccatgtagaagatcaacaccacctgcctttggatatgctctggctacaacggcaactgactactgcggcactctatcagcaagaaaatcagattacagctcaatcaattaaacaagcagaggaaaatcgccgctggcgtcacaattatctgcctgaacgtggtttagaagaaattcataaaggccagattcttatccatacccaaggcatggtcattggccaaattaatgggttatctgtgctagagtatcccggccatcctgatccagtaggagagccatcccgtatcacttgcgtggcccatatgggagatggagaatttgttgatgttgaacgcaaagttgagttaggtggcaatatccatgcgaaaggcatgatgattatgcaagcatttttaatttccgagctaaaattggatcaaccacaacctttctctgcatctattgtatttgaacagtcctatggtgaagttgacggcgacagcgcttctcttgccgaattatgcgcattgataagtgctctttccctgcaacccattgatcaacaactagccgtcacaggtgcagtagatcaatttggttatgttcaacccatcggtggtattaacgaaaaaatcgaaggtttctttgaagtatgccaccgcagagggctaacgggtcaacaaggtgtcatcctaccagcagcgaatatccatcatttatgccttaatcaacccattgtagatgcggtaaaagcgcaaaaatttcatttatggtcagtaaaacatgtttctgaagcactgcctttattgacaggtatcccttattatgatcaacaagaaacacacttgttagctatgatacaagaccgtataacacaggcgaataatcaggaacgacctaaattcccgtggtttcttcgctggttgggttaatttagaatgtctgatcggagttgttcagcgtacaagtgtactctattatttaccctacactaaatataaggctatctgataatatggttgataaacttaaatcctacacaaaagaagatcttatcgcgtctggacgcagtgagctgttcggagaaaatgggccgccattaccatctggtaatatgctaatgatggatcgcatcattgaaatgacagaaaacggtggtacccacgataaaggttacatagaagccgagctggatattacccctgatttatggtttttcgactgccattttattgatgacccggtaatgcccggctgcctcggtcttgatgccatgtggcaattggttgggttcttccttggctggttaggcggtgaaggcaaaggccgtgcccttggcgttggcgaagttaagttcaccggccaagtattaccaacggctaaaaaagtcacttaccgtatcaactttaaacgtgtcattaaccgtaaattgattatgggactggctgatggtgaagtgttagtagatggtaaaatcatctatacggcaacggatttgaaagtaggcttgtttaaagataccagcgctttctaatcaataatcagtaacatatcgaaaaggaaggtgactggctaattgcttttcaccttttttcactaaaagcatactaccaagtaatcaatatcttaaaaaaatacctggtgctatttttgctccctcaaaggtaattccggttatatctcagagtataggattcaatattcatacagaaaaaaatcaaatcaagtcctaactttggcctatctcgactagaaataacacaaatccgcacctgaatatctgcattacaaacacccaattgtcgctgaccaatcagtatacaattggcaaattgtgctatgatcaaattgacctgatatatcaaacaagctcaccaaagcatactgataacaggtaaaagcattaataatgattaagattgatgattaatattaacaaacacaccgaggtaatattatatgaacatcagaaaaatactgctcataatcatcgcattgactcttacaccaactgccattgcaaaactcgatagaattgacggtaccgtcgaaatgctaaaagcgcctaacacaaatggagattgctatggaaaaatagcgacgcctacccgtgtccagggatttaggtgggtatgtacgattaatggcggatcgacgctattatcattgcttcaaacagcctatacaagtcatgaaactataaccatatcagtcgatgggattgaagaatatagccgtctcttttgggttgaattacatcataaatgtttatcaaacccatcttactgcaattattgaattaccatcatctctcgtatttagcaaatggattatttaatggccgcaatttcagtcatcatgttgaataggttaaataggatatgtcacctagcggccactcattcacatattacctaattcgcaaataacagcacaacaacatgaaaaaattgtaatcctgacattgataatacttatcgatttattacatacaatgcattaaataacgtttcataattctgctacacataaccttcttcaacacattgttatgaaattattggtggtataaaatgcggcactattttggaatcttatttaaagctttcattacacgatgctttaataatttaataatttaataatttaataaatagctggtaagccattgacgccgggaaaaacttattttacacggtacgagcatttttactttagtcacaactgaaagaaaatctggacagagaaaacttacaggattcaatctgacagatatctgtataaacaatcagtcactgtcagattaaatttgggatatataccacgttgataaggaatggaggtttttctcacctaacctataccatcagtttggcagactaagccatcatcgccctgtcttccatagcctgacgccatcctcctaaccaatgagaacgggcatctaatgaataatagggacaatgctcccttggacgccccaaaatacctgcatggtaccctctcgataatgctcgtgctaaacgatctcgtttctgtctcttcatgcttttatttacctcataagctagatcagtagaaagaaaacagtggtcatcatttatccaaccacaatttagaaatacccctataaattttgaaaatcaagtcaagaaattcatattaatgtaatatttgttatatcagtacaaaaaaaacgataacgtattaataataaagaaaaatttttatcctactgataataccaattttctccgagcgcaaaagttttacactcggagaatgacagagggttatgattgggaaattaattgactggcaatagcttgcaccaactgactccatccttttgccaatgtgcggactaaatcatcgtaaccatcttcttcctgttttagctctagattaaagggctgtttaacgacactcccttgatgagttaatgtccagtaaccttgcaaaatcaccttaccatcataacgaccatgaaaactggtgactgtcacgtctagagtatcgggcttattaaccaatggttgagcagaaactaaacgctgaggcaatgccatagtcaactcagctaccagcacttgctgtaattgttgttcaagtggacttgcccacaagtgattcgccgcactgacataactaacatcactactttgatacaccacaccggaggaggacagataatcggacaacataacccgttgtacccataattggcgatcatgctgcacaatagcactcttttgtgatgctattgccactaccggcaattgatagtaagttttttctggctgacggctacaagcagaaataaaaatcactaaaattaatgccaatcttctcatcattttttagcctttttcggttctggatcttcaattggcttagactcaaaaactaacgcattgctcttattattcaacgtcctcagaacaggtcgcagttcactcaatacttgatctaatcgctgcatattatccaacatcttattataagccggtgagccaggctgaaaaccttgcatactgcggctaaactcctgcaatgttttctgtatatcttttggcagatctttggtttcaggattcgccagcaccttattcaattcatcaagggtctgttgtgcttttctgatcgctttctggctctcttccaaagtgcgaatagcctgattaaacattggctcaaccggcatattattaattttgtctaacgctgcaataaccttatgttgaatttgagcaaggccaccactgattgtcggtaatagcggataacctgcaatttcatacggaccggcccaccctttttcatttggatagaaatccaaatcaataaacagtgcccctgtcagcaaattacctgacttgagggacgcccgcagaccgcgtttagttatgctattcagctctttctcaacatcaaacccttctcccaactccttctcaaagcgctccggttcaatcgagataagtactggaatacgaaaatcgttatctaaccgctgtctcattccctctgaatagaatggtacttttgccacagtccccatacggataccacggaactctactggcgcacccggctgtagccctcgaacggaatcagagaaaagcaacagataatctttatgttcggtatataaagaatcctgaatgcttctttggttgtcaaaaagtttataaatagctttttctttaattggctctcccaattcccaacccttaggcacatcaaaactgacaccaccaccaaacagcgttgataacgaagccatttcaacacgtaccccctgagaagacatatcaaaggtaataccactctctttccaaaagcggacattgcttgtcaacaaaccatcataaggtgcattaataaatagctgatatctcatcagatgagatttcggttcaaactcgctggtttcaacagaaccaacccgataaccacgaaacaacaccggatcacccggattgagctggcccgctttatcactgattaggatgacgcggataccttttgcatcaggtgaagccaatggtggtgagtccaacaaattaaatttatcttcttcatcaccatttgttcccggttgaagctcaataaaagccccagacagaagggtaccaagaccagatactccatcacggccaatctgcggtttcactacccagaaagcgctgtcactacgcaataggttttccatgccatcattcagccgagctttaataataacttgactaagattatcactcagcatgaccctctcaactacgccgacatccacactacggcttttaattttagtttttccagcttcaataccctccgcgttggaggtaatcaacatcacttccggcccttggtggttgaaatggtaaaacaatatccaagcaccaataagcactgtcacaattggtacaatccaaactggcgaccaacttttaattttatcgattttagcctgactctggtcttcaactttatccgtcaccttgacaccccttcattgccttataacgaatgtttaacgttggctctatcccaaattaaacgcggatcaaatgtcattgccgcaaacatagtcaggatcacaactaaagcaaaaataactgcccccatagcagggtagacactcatcaatttccccatacgtaccagtgatgacaatattgcgataacaaatacatcaatcattgaccaacggccaacaaattcgacaacttcataaataaaatgcatgcgggaagaatcccgtttaccgtgacctttggtatcccaacacaaccagccaattgccagcattttcagggatggcaccataatactagcgataaaaatgactaaagcgaccgggtatgaaccgacactccacagtaatatcactccagccataatagtggaatcactctggttacctaacgattctgtcaccatcattggcatgatattagcaggaatataaagcattaaagctgtcactatcagtgccattgtccattgcagactgttgcgacgacgggcatgcccacgcgtataacaacgtgaacataccaattggtctgccggtaaaatagccgtacaacactggcataatcgaacaccctgcactaaccccgatcttcctgcctgtaacggtatattcaccttaggtgcgagtgttatctgattccataaccagtggcgatccaaacattgaaatgctctcacctggagaaggcagaacagacaatatggcaaaaaacttaaacctaacccaatatcaccataagccattaacttaacaaagctgactaacacccctgccagaaagatttcaaccatacaccagcttttcatctgaaataacattctggccaaccagacttttatcttctgagaaataacaacactctggcacaagagaataatcgctaccatacaaaacgcaggcaccagttgaacacagagcaaaaagaatgttcccacactgacgtaattttcattaaacatcacctgagggatttgagataaggtaatttcactgctaattcccgccacactcatgctgataaacggaaacaggcaagccattaacagcataaataatgcactgactgcataacctgttggctgatgttttggttctttccaccatgtgactaatgtcgtcttacaacgaggacaaattgccttcgttccctgaacccattctggcaatgtcaccagcaaatcacattgagggcacaataccatttcatgatgatggttagcggaacacaagatctttctcctgttaaggaaatcgggaatatccacagaatcatactcagaagaatttcgcagtatgattctgctaattatgttaactattaactgtttttcaatgtttccaattcctgccagcgatcaaaagccgcttctaatacttgctctttttgagacagttcagtcaatattttttgggttattacatgaggctgattaaaaaattcaggagcactcacttgagattgtaactgatcaagctcttcttccagtttctccagcaatgatggtaattgctctaactctcgtaataaatggtaactcattttgttacgagagttttttggcggttcctgaatcttttctactttaacttccgtttgaagttttttcgcatttttctggcgcaacgatacaacctgttcgcgctgttgctgagcatcgtaataaccaccaacataattattgatcgcaccattaccttcaaaaatccaacattctgtcacggagttatcaacaaattgacgatcatgactcaccagcaatacagtacctgtataattctctaccagctcctccagcaactctaatgtttccacatccagatcgttggttggctcatcaagtaccaacagattactgggtttcaggaacagacgcgccagcaacaaccggttcctttcaccaccagaaagcgctttaaccggtgtcattgcccgctttggatgaaacagaaaatcctgcaaataacccagaacatgacgagggcgaccattcaccatcacttcctgtttaccttcagccaggttatccactacggttctttccggatcaagtgctatccgatgctgatcaaaataagcaatttctagtttagtaccacaatgaacacggccactatcagattgcagctcacctaacatcagtttcagtaaagtggttttgccacaaccatttggccctaccagtgcaatcttatccccacgctgaatttgcgcactgaaattattgaccagtttcctttcaccaatttgatagttaacattttccaactcaaagacaatttttccggaacgactcgcttctcccatctgcattttagcggttcccattacttcacggcgttgtaaacgctcaatacgtaatgccttcaatgccctaacacgcccttcattacgagtacgacgcgctttaatcccctgacggatccacacttcttcctgagccaacttacgatcaaattcagcattttgcatctcttccacacgcaacgcgtcttctttgctttcaagaaacttatcgtaattacccggccacgatactaacttaccacgatccaaatcgacaatacgggttgccatattgtgaataaatgaacggtcatgagaaatgaaaacaaggctaccctgaaaatctttcaggaaattctccagccattcaatcgtatcaatatccaagtggttagttggttcatcaagaagcaagatttttggcgaactcaccagcgcccttcccaaggctgctttacgcaaccaaccacctgaaagagaagagagcttcgcttccgcaggtaaagagagctgtttcaatacgtcattaatgcgactatccagtgaccataatccacggatatccagtacctcctgcaattctgccaggcggttaaggtttttctcatttggctcctgctccaccaagcgggagaccagatgaaaagatttaatatattcggcctgctcctgaacaccttcggcaacaaaatcaaaaaccgtcccttctacattacgcggaggatcctgttgtaagcgagcgacaaccagatcctgttggtaaataacctgaccatcatccaacggctgctcttttgctaatacccgtaacaaagtagattttccagcaccgttacggccaaccagacaaaccctttcattttcttctatatgcaattctgcattatcaagtaatggtgcatcactgaacgacaaccacgcaccagataaattgatcaatgacatagtaattatttttcctcaccagcatgacgtaatagccagcagttgtgaatctgacgattgcgggcaaaatcctgcgactgggttttactggtgatttcctctgccaccaagccaactttttccagctcagcaaaatccattttaaaaccacgtttgttattagagaacatcagcgttccgccacgacgcaacaagcgcttaagctgtctcatcaacatgatatggtcgcgttgtacatcaaatgtatcttccattcgtttagaattggaaaaagttggcggatcaataaaaatcaaatcaaactgttcattggcccgtgccaaccaagcgagacaatctgcctgaatcagccgatgctgacgcccagttaattcattagcctgtaagttccgttcagcccattcaagataagtgcgagacatatcaaccgtcgttgttgaacgcgcaccgcctaatccagcatgtaccgttgctgctccggtataggcaaacagattcagaaaatctttcccttcactcatttcacctagcatttttcgggcaatacggtgatcaaggaacaagccagtgtccaaatagtcagttaaattgacccagaattttgcgtcatactcatttaccagaaagaattcctgtttttctgccattctttcatactggcttttgcctttctgacgctgacgagttttaagtactaattgatttgatgagagtccaagaacttgcatcgttgcactgataacatcgaataaacgctgacgcgctttattagcatcaacacttttcggcggagcatattcctgaatcactactttatccgcatagcggtcaacagccacattgtattctggcaaatcagcatcatacagacgataacaatcaatcccttgctgttttgcccagtgagctaatttcttttcatttttgcgcagacggttggcataatcttccgccacattcacctctgatgaatgcggtttatccgacaacagataatttttctgtacgcaatccagtggaccatttttagctttaaactcacgttcagcccgtaattgcagacaactcagcaattcaggtgacgcactgaatagcgacagacgccagctagggaaacggcttttcattatccgcccaaacaaactgtgcagtgcaatcaatgccggctcactttccaaacgctcaccataaggtggattacttaatactgtcccagcagggccttctggtaatggattttccagacgactggcatcaccttgctgaaaagtgatcaactgcgcaaccccagctcgacgagcatttgaccgagccatatccagcactctgcgatcaatatcagaaccaacaaaacggcaagttgtctcctgaagacctttacgaaagcggatctgcgcttctgtgattacctcacgccaaattgcttcatcatgttttaaccaagcagtaaagccccaatgatcacgatgtaaacccggagcacgatcagccgccatcattgcagcttcaattaacaatgtgccggaaccacacatgggatcaaccattggagtccctatctgccaacctgaacgttggacaatcgccgcagccagattttctttcagcggagcctgaccagcaagatcgcgataacctcggatatgcaaaccatcaccactcaaatccaatgcaacactggctttctctttatttaggaaaacattaatacgaacatccggctgctgctttgccacattcgggcgttgatccaacttacgagtaaaactatcgacaatggcgtctttaacttttagcgccccatattgcgtgttacgtatctcttcatttgtaccactgaaatgcacagagaaagtgctatgtacagaaaaaacctggctccaatcaatagactgaaccccaagatagagatctaaatcgctataaacattaaattcatttagcggtagcaaaatacgtgatgccagcctactccacatcagacttttatacatcactctgccatcaccttgaaaatgaactccaccttgcacaatcttgcatgattgcgcacccagcatttccagttcgttcttcaacaattcttctaatccacgcgccgtgctggcaaacagagagttcatatgacatatcaccaaaaagaaaattgttacgcattatagccaatccggatgacatgtcataaagttgcgcatgtcagaaaaatgttttgtggagattaatggatgatcacgctgtctcgcctgtatacccacccagtaaaatctatgcgtggtttgcaactttcccatgcattagtcagtgaaagtggcctcatatttgatcgcaattttatggtcacaacgacagatggaacttttattactgcccgtaaataccctcagatgctgttatttactccagctatgttaaataatggtatttatctgcgtgcgcccaacggagaaaacgccacggtactttatcgtgatttcctgcctgaacagcaaccaacggaagtatggggcaaccattttacggctctcattgcaccagaaactgttaaccaatggctaagtagtttctttgacattccggtgcaattacgctggttaagccatgaattaacccgcagagtaaaaaaacaccccgaaattccattatcatttgcggatggttatccatttctgcttattaatgaagtctcatttcatttattacaacaacgttgcccagccagtattaaattagaacaatttcgcccaaatattgtcattaccggcgcagaagcatttgcggaagatagctggcaatcaattcagattggggatgttatttttgacttacccaaaccatgcagccgctgtattctgaccacggtcagcattgataaaggcattaaaaatccaaacggagaaccattaacaacattgcaatcattccggacagcagagaatggtgatatcgattttggtcagaatttaattgctcgctccagtggtattattcgaatcggagataatgtcaccgtattagctaaaaaagacccacgtcaatatggcagcagtgaaaaagctgagaatattgatgtaccaaaaacaaatgagcaatctgtcattatcgaatataacaggcaaacttttacaggtaacaatcaacaaactattttagagcaactggaacaacaaggaataagagtcccttattcatgtcgggcaggcatatgtggatgttgtaaaattgctttaattaaaggagatgtttttcctttaaaagccacagcaattaaagaaaatggccacattctggcctgctgttgtattccaaagaataaccttattcttaataatatgacgcgttagcagaaatatctaaccatgtagaacaattaatttttcaacaaagaggcgttatctaaatcctgattccgttatcatcctccccatgttggcactaacatggcctaaggggaggaaattaatggacccttttcataacttcaccaaaaaatcaatcatattgattattgcaataatgaattaactattacgataatgaatttatgtctactgtcataaaatgattacactctaattaggagctaaagcaactcaaccaaaacacagaaaggaataagtcatggcacgtatcatcattgcagcgctcgcaacccctggacatgtctatccaatgttaaagatcgctcaatcactgatagcacaaggacatcaggtaaccgtattcaccggtgcattatttcgccaacaggtagaagctttaaatgcacaatttgtcccttttgatgaacaggtagattttgactaccgccatttagaacagcattttcccgaccgtgctcaacttcctccgggaaatgtacaaatggcactcgcattcaagaatttcttctccgccccaatcccatttctcgaccatcaactgcgacaaattattcgtgaacaacaagcggaattactgatagccgaaaattgcttttatggcatattacctctgttgcaagaagaaaaaacccatcgtcttccagtcatagtcattggcataacacctctggcttactcttcgaaagattccattttctggggaccacgtatcccacctgcggtattaccacctgaattaacacatgaacagctcgtcgataaagccgaccaacaactcatagccgaagtgcaggatagcttcaataattcattagtccagtcaggaggctccgcattaaccagacttttcaacgatgaagtcatctttggtgctgatcgctttttgcaactctcaactctggcatttgaatatccacgagaaggattgcctgatacagtccattttattggaccacttcccaaccctgtaccgacaacaacatcacctcaattatgggaagaagatgatccacgtccattggttatagttactcagggtactatttccaatgccgatttaaatcagttgattttccccacattgcgtgcactggctacattaccggtacgtatattggcaaccaccggtggcagatcggtagaaacactgagtaaagatctacctgaaaacgcgcgtgtcgaagaatttatttcatttgagcactggctgccgaaagcttcattgctgatatccaacgggggctacggaaccatcaattacgctctcagccacggaacaccattacttattgccgatgcaggagaaggcaagcaggaagcagcgtttcgtgttgtatgggctggatgcggtactaatctggatacagcacatcccactgaatctcaacttaagcaaacagtggaaaatatgctgagtacagacttgtttaaacaacgtgcgcaaattgtccaaaaagattacgcaagacatgatgcattagcagcaatatcccgtcacgtagaacaattaattcttgcacaaagccacattcactaaaccctagataccttcttctttcctctccgttttggtgctaacacagaccgacagggagaggaaaccagcatatttcatcacattatgaaaaaataaatcaaagttattattgtcataattaattaacccgaattctggataagaaattgacgagaagcctgttccaggagcaaagttttggtgtgcaccaaaaacagctccgaggggggaacaggctatggacaacttagttgaaattttctgtgatgtcgatgatttttgccgttttttcatccctcaatgggaacaattttgtctcgatagcgggcatcgtttacgccgccgacaaggtcatatgtatcccagtgaaatcatgaccattttgatcctttttcatatgtcgcattaccgtgattttaaacatttttatctagaacatatttggaaatatcaccataaggattttccaaccttgcttagctatcctcgttttgtcagtgtggctccttccgttttggtgccattatgcagctatctgactcaattaaaagggaaacccacaggcattgcttttattgattccacccgtttgagtgtctgccataacattcgcatccctcgacataaggtctttgcggggatagcaaagcgcggaaaaaattcaatgggctggttttacggtttcaaattacacctggttgtcaatcatcagggtgaaattctcgcgcttaaagtgactccgggtaatgtggatgatcgggaacctgttcgtgaattatcaaaagaattaacgggttctctttacggtgacaaaggttacctcagccaggaattggcggacgatttagctaaaaccgatgtcactttcatcacgaaaaaacggcgtaacatgaaagcgagtatgcaagctgagtgggataagataatgttaaaaaagcgttttatcattgaaacgattaatgggcaattaaaaactctttctcaaatagagcattcccgccaccgaagtataaaaggctttctgttgtgcgttttaggtggattgattgcttactgccttaaattgaagaagccatcactgaaagttttctactcagaagacgatttttcaatgacggattaagcagaattcgggttaattattatttttgtaatgaatttataaccgtagtcataaaataatcacactctgagtcaggagctaactagcgtaattaaatcaaaacagtacaaaggagcaaattatggcacgaattgtcattgcagcggttgcaacacccgggcatgtctatccgatgttaaaggtaactcaatcactgataacacaaggacatcaggtaactgtcttcactggcgcattatttcgccaacaagtagaagctttaaacgcacaatttatcccttttgatgagcagatagactttgattaccgccatttaaaacaacgttttcccgaccgagcgcatctgccgccaggaaatctgcaaatggcactcgcgtttaaagattttttctgtagcccaatcccattcctcgaccgccaactacaacaaatcatccatgaacaacaagcagaattactgatagccgagaattgcttttatggcatattgccactgctgcaaaaagaaaaagctcatcgccttcctgtgatcatcattggcataacacctctggcttactcttcgaaagattccattttctgggggccacgtatcccacccgcactattaccatcagaattgacacatgaacaactcgtagacgaggaaacccgacaactcataaccgaagtacaggatagcttcaatgacgcattagctcagtcagggtgcactacgttaaccagatttttcaacgatgaagttattttgggttctgatcgttttttgcaactttcaaccctggcatttgaatacccacgagaggaattgcctgatactgtccattttattggccctctccctaaccctgctccgataacagaatcacctcaattatgggaagaagatgatccacgcccattggttatagtcactcagggcaccatgtctaatactgatctaaaccagttaattttccccacattacgtgcattggctaaattacctgtgcgtgtattagcaaccaccggtggtagttcaatagaaatacagccagagaacatacctgacaacgcacgtatcgaagaatttatctcatttgagcactggctaccaaaagcttcattgctaatatccaacgggggttacggaaccattaattatgcccttaaccacggtacaccggtgctcattgccgatacaggagaaggcaaacaggaaacagcgtttcgcgtcgtatgggctggatgcggtattaatctggatacagcacaaccgacggaatctcagcttaagcaaacagtggaaaatatgctacgtacaaacttatttaaacaacgcgcacaaatcgttcaagacgattactccagtcatgacgcattagcagcaatatcccatcacgcagaacaattaatcttcgaaaatcgtgctaattaacttcaatatcccccctccccatctcggagctaatgttatccaaaggggaggaaattattaaaatatttcttatctatttttcacaccaactccaaatgaacaagctatagctatcacatataataggcaagtctctgtgataatagccaacaggaaacaggaaacaggaaacaggaaacaggaaacaggaaacaggaaacaggaaacaggaaaagagtgacttactcataatcagatgggaagatgtaaatgcgataaaatttcctcaaatgataaagaacaattttcttaattaaaaacggtgattatcttctgacttgtcgctctattttcaaaaagtctctttactcttgaaatcacagaacaatgggatcttaaacccaaatcaaatcgcagtgccataaattggcatataaatagattccacaaatggcatcaatcgatcattcataatcttaatgggatcacaaaagttcattactcgatcggataatgttaattgtggttgagctagcagacaaaggctcgcactatccccggcctctacgaccaagaatatagcatctgtcccgcaatcctggagccgtacctgaatcagttctccttgtaccggcttctctatcatggcaaaacgagaaaaataccagcttcttggcatctgtggcttaataaagcggaaagccactaacgcattaagaactaattcagctctggattcatctgaaatattaattcggcgtgtctgttcttcaaaacaataataaagcgtcgcatcttctacagaaaatgaagtttctcccattgcatagggtatcaacatcttagcaggaaaacaggaacgaaaaaccataccattagacagatcgagcattacacggtcatggttaacatcaaaataccagcgccattggtcatcgggtttaatattcatgaattatccttttatacccgttatctttcaagttgcctctttgttggctgcactcactcaccccggtcacatagttacctatgctcccggggattcgctcccttgccgtcgcgatgcaccttgaaatccatagggtatatgccaggaaaatttacatcgccaaacagattgtaaataacttgccagctattcagtgaaataagccctgccataattaaaagatatgcgaagatacagataaaaattaggtgatcagagtgaatatagacgagttgggggcaaaaataaacccccaatgataaattaacagcaagatttagatatgattgacgatatctttgattaattttggaccatgatagataaatccagagaaaatctgtattaaagaagcccccgctgctattttttctctggctgcggtgagtgaatctattccaccaacaccgataataggaattttatctcttaattcttgggagagctgacgaataacttctgtactacgtaactgaaccggtcggccacttaacccaccagcttgttggcaatagttaagcccttcaactaagcgcttatctaacgttgtattagtggcaatagcaccatcgatattatgacgaattaaactatctgcaatttgaatcaactcttcttcagaaagatccggggcgatttttaccgcaacagggacatatttttggtatttttgctgaagttcaccctgtttatttttaatcgccgataatagatcatccaacgcttcgccgtattgcaatgttcttaagcccggcgtgttgggcgaagaaatattaatcgtgatataaccagcgtgaggataaattttatccatgcagattaaataatcatcttttccatgctctactggggtatctttatttttgccaatattgatcccaatcactccaccatattttgcctttttgacattctctaccaggttatcaacaccaagattattgaagcccatacggttaattaacccttctgcttcgacgatacggaataatcttggtttatcatttcctgcctgagcacgtggggttacggtgccaatttcaataaaaccaaaccccattgcaccaaatgcatcaatacaatcgccatctttatcaaggccggcagccagaccaaggggatttttaaatgacaggcccatacaagtcacaggctttgtcgcaattgactggcggataaaaaactcgaaaggagtaccggtaatacgtttgagctggcggaaggttaattcgtgggcgtgttctggatcaagctggaacaacgctttcctggctagtgggtagcacataattctaaacccattaattaatttataaacattaaattacaaagataaagctacacatgacacattcagataccatttggaagtttctgagctaaagaacgcccattttcaaccccccaatatttcggcagatagggtaaccgaataacatgggctgaatctacagaaatatactcaccagaagcaaattttttccaaatgttgcgcgtgaaacaagaatacactggtaactacaatcgttgacatttttgcccaagatacttagcttctctcgaacaactacaaaggggagcaaaccaatggatgctctttaatatcttgagcaattttcatactacaagcatcaaccaataaaaatgtatttcaatgccgcaataacaacagcaataccaactgctaatgtcagtttcttaatccaatctaaatctgtttttatagtaccaatatcggttttaatgctctcagtagcaactgttagatctgctttggtgacaacacttatatccgtcatctttcaagttgcctctttgttggctgcactcgctcaccccggtcacatagtttgctatgctcccggggattcactcccttgccgccgtgatgcatcttgaaatccatagggcataaattggaaaaaatatcgggctaaatcaccgttagcccgataacctgataaaaaatagctatcagctttctaatgccttggtaattttttcaaatagatcaccagacagattttccaatgctttcaactgttccaacgcactacgcatcatgttttgacgtttttcatcataacgtttcaggcgaatcagcggttcaatcaaacgagaagcaacctgtggattacggctgttaagatcagtcaaaatctccaccaagaattgataaccactgccatcttcaacatgaaatgcaaccggattgttaacaaatgccccaatcagagcacgcacccggtttgggttgctcatactaaatgaacgatgattcagaagatggcgtacattagccaaaacatctaccgccgggctacttgcctgcaagctaaaccatttatccatcaccaggccatcctgatgccatctaccatcaaattccgccatgagttgatcacagcaaggtaactctgccagcaccgcgccagataatgccgccaacgcatcagtcatattgtcagattgatgatattgatttgataccactttatcagcctgctcttgatgaccaaaggccagataatatagacagatattacgcagagagcgctgagcaatatcctgatgagcgacgcgatatgcaccgatattgatagcgttataaaccaccgcgaattcatcagccatttcctgagccaaagtacgggtgattgtatccaaaacttcatgaatcgctttaggatcaataatcgtaaacagttctgctatctcactctctgatggtaaagccaaaatatgagcagccagagctggatcaatctctttatccaataacaccgcgcggaaagcatccaccacatgcattggcagttcgatcggctgcttctgctggtaacggataatattcagtttgatatagtttgccatcaatgactgagccgcatcccaacgtgaaaacgcattgcgggcatgtttcatcaagaatgccaattgctgatcactgaatgtgtaatccagtttcactggtgctgagaattcccgtaataaagagggaaccggcagtgatggcacatcatcaaatacaaacgtctgttctgcattagtcacattcaatacattgtgaaccggttgaccatcataacgtaacggaaccacatgacctttactgtcataaagctcaatatccaggggaatatgcagaggctgcttctctttttgatcggcggtagatggtgtcatctgactgacatgcaacttatattgctgcttttctgcatcatattcatcgcggactgttaatactggtgtaccagactggctataccaacgacggaaaagtgacaaatccacatttgatgcatcttccattgcctgaacaaaatcatcacatgttgcggcactaccatcatggcgatggatataaagctgcatccctgcctggaattgctcttcacctagcagggtatgaatcatacggataacttccgcgcccttctcatacacagtcagggtatagaagttattcatctcaatcactttatccggacgaattggatgggccattgggctggcatcttccgcaaactgtgccgaacgcataacacgcacattattaatacgattaacagaacgaaagccaagatcagagctaaattcttgatcacggaataccgtcaatccctcttttaaactcagttggaaccaatcgcgacaagtaatgcgattcccggtccagttatggaaatattcgtggccgatcacagcttctatattaaggtaatctttatcagtcgcagtttcagattttgccagcacatatttggagttaaagacattcagccctttattctccatagcgcccatattaaagaaatccaccgcaacaatcatataaatatcaaggtcatactcaagaccaaaacggctttcatcccacttcatagcatttttcagggaggtcattgcccaatcagcccgatcgagattgccacgatcaacaaacagctccaatgcaacttcacggccactacgcgtcgtaaaagtatcgcgcaacacatcaaaatcacccgcgaccagagcaaacaaataacatggttttgggaatggatcttgccatttcacccaatgacgtccatcatcggtttctccctgttcaacccggttaccgtttgaaagcagatacggatacttggctctatcggctgtgatacgcgtggtaaaacgagccaatatatcaggccgatcaagatagtaagtaatatggcgaaacccttctgcttcacactgggtacaaagcgcatcaccagaaacatacaagccttccagcgccgtatttttcgatggatggatctcattgacaattttcaaagtgaactgaaccggcaactgctcaatgatcagcgccctctcctgttcatggtaatgcacccacggttgaccattcacatgaagacttttcagtgtcaaatcttcaccatccaacactaatggcgttatttcgtgactcagacgttttatctggctgattgcggtgatttccgtgttatcggcatcaagattaacatcgagttcaatatcagaaatcgtatagtcgggagcgcgataatcccggcggtacttagcttgtcgctgttgtgtcataagaaaccttttgtttcatgcctgatggaattaattcaatattagaccttacgctgccatagaaagaggttgaatttcaagagtgaataacgcaccttctggcgtttaacattcattaagaacgagtatgatgttatgtaagaaatttgtttactctttggtgctggttatcacttaatgatcaaataacatgataacatttaaccaaaggccctgtttagcttcgatattttggtgaactatatgacattatgtgacttcaataacaaaataatcccggtatactcttccaactttatcgatttagctaatacgaatacgctccgtgaggatgcataacgcgctatgacactagacgctaccccaattattaaatcactgcttgatactgacgcttataaacttcatatgcaacaagcagtgtaccaccgctacagccacatgcctgttgttgcagagtttcgctgccgcggcgacgaactgctaggtgaatatgccacagaattacgtcatcaagttaatatgatggctgatctggcattaaccgatgctgaatttaattacctttccagcctgccttttttcaaggctgattatctggactggttaaaaacctttcgttttaacccacagcaagtcaatatttctgttacaaatggcggccaattagctatccatatttcaggattatggtatgaagtgattatgtgggaagtcccattactggcgttaatcagtgaattaattcatcgtcatcactcaccagataatacggtggaaaatgccgtcaaccagctacgcaagttgatcaaactgttctatcaacatgctgaaaatgaaggaatcgatctctccagttttaaactgatggatttcggtacacgccgtcgtttctcacaccgtgttcaacacgctgtcgtcagtgagctgcaacagcatttcccttatctgattggcactagtaattaccaacttgcacaacagcttgggctccctcctgttggaacacaagcgcatgagtggtttcaagctcatcagcaaatcagcccggatctggctagcagtcaacgagaagcattacagagttggctgaaagaatatcctaaccaattaggtattgccttgactgactgcattacaatggacgcgtttctgcgggactttgatgcccagtttgccaaaaattatcaaggcttacgccatgattcgggtgatcccgttcaatggggtgaaaaagcgatcgcccactatcaaaaactgggtatcgacccaatgacaaagaccttagtgttctctgacagcttggactttcaaaaagcactagcgctctatcgtcatttccacaacagaataaacctgattttcggtatcggtacacagctcacctgcaatatcccaggggttaagccactgaacatcgtcatcaaacttgtcgagtgtaatggcaaaccggtcgcaaagctttcagacagccctggcaaaaccatttgtgaagataacgagtttgttaacaggctacgcgccgcttttgatataccccaggttaaacaagcttgttaactcaagtttcattaaaaaataccactgtgctgctggcagataaagcagcagcacatctgaaaagtgcgctttcccctctatttcaccgtttaaattgatgatttccccttgtttcctgaaacagggcaagtaacatagaataagttgccccttgtggggatattcattttcataaacttgaactgataaagaagagagaaatctatgagcgtagcgcctgtagtcgacgtactgcaaggccgggttgcggttgatagtgaagtcaccgttcgcggctggatacgtacaaggagagattctaaagctggcatctctttcctcgccgtctatgacggttcctgctttaatccattacaggccgtcgttaataataatttgcccaattatcaggatgaagttctgcatttaactaccggttgttctgtcgaagtgacagggacagtcgttgcttcccttggtcaagggcagaactttgaactgcaagcgacgaaaatcgtcgtgatcggtctggttgaagatcctgacacctatcccatggccgctaaacgccacagcattgaatacctgcgcgaagttgctcacctgcgtccacgtaccaacctgattggtgccgttgctcgtatgcgccatacccttgctcaagcactacaccgtttcttccatgaaaatggttacttctgggtttccaccccgttgatcacggcggctgatacagaaggtgctggcgaaatgttccgcgtctctacgctggatctacaaaatctgcctttaactgacaaaggtgaagtggatttcaaccaagattttttcggccgcgaagctttcctgaccgtatctggacaattgaacggtgaagcatacgcttgtgcattaagcaaagtttacacattcggcccgacttttcgtgctgaaaactctaataccagccgccatctggcagaattctggatgcttgaaccagaaatcgccttcgctaacctcaatgatgccgccacattagctgaaaatatgttgaaatatgttttcaaagccgcattggcagaacgtgctgatgatctgcaattcttcgctgaacgcgtggataaagatgttatcacccgcctggaaaaatttattaattctgactttgctcagattgattacaccagtgccattgaaattctgcaaaactgcggccagaaatttgaaaatccagtcttctggggagttgacctttcttcggaacatgaacgttatctggcagagaaacatttccaagctccggttgtcgtgaaaaactatccaaaagatattaaagccttctatatgcgaatgaacgacgacggtaaaactgtcgcggcactggatgtacttgcaccaggcattggcgaaattatcggcggctcacagcgtgaagagcgtctggatatgctggataagcgtctggaagagatggggcttaataaagaagattactggtggtaccgtgatctgcgtcgttatggcaccgttcctcactctgggttcggactgggctttgaacgtctggttgcttacgtgactggcgtgccaaatgtacgtgatgtcatccccttcccgcgcacaccaagaagcgcaaacttctaatgattgcgtaaaacaaacattaaaaaatcattatgtataaagccagcaaaagctggctttttttattcttccaattcaagacacgatcaaaaatcctatttcatttacattttgcaatatattattttcactttattacaaaaatcgtcactttgtatcaattaaatgatagataaaatccacggctaatgaaaaactgtgccccaactcggacaacacgatattttcataaataatttcaacgagtttcttaaaggaattatttatgtcagtaacagtatccgaataacaccaatgatggtcattaacgatagtaattaaatgaaggtaacaataatgaagggtagtatcttttccgcggtcatcccagtgctgttgactgctggtgtagcaaatgccgctgaaatttataacaaaaacggtaataaactggatttttatggcaaagttgatgtacggcatcaattcgctaaaattacccaaaaatcagatatataccctatctatagtgaagatggtgatgcaagctacgtccgtctgggtttcagaggtgaaacccaaatcaataaccaactgaccggttatggtcgttgggaatacaatattcaggccaaccaagttgaggcaaatgattccgaaggtaatcaaacccgtctaggtttcgcgggtctaaaattggctaaatatggttctctagactacggtcgtaattacggtgttctctatgacgtcaatgcctggactgatgtactgccagtattcggcgctgattccatgtcgcaggctgacacctacatgactaatcgtgctaccggtgtcctgacttatcgtaatacggatttctttggtctggttgatggtctgaacttcgccctgcaataccaaggtaagaacgacgaagacagcaaaaacagccgcaattcacacagtaaatacggtagtcgtagtaagcccaatggtggtagtaatggtgacggcttcggcctctctgttacctacgatataggcaatggtatcagcgtaggaggagcctactccaatgctgaccgccctattacacatgaaaggctcgttacctctgtcgctcgtggtgaaagggctgaggcatggaacgttggtgccaaatatgatgcaaacaacctatatctggctgccatgtatggcgaaactcacaatatgacctctttcggctaccaagatattgtctctgcaaaaactcgtaatatcgaattaactgcccaatatcagttggattctggtctgcgcccatctctggcatatgttcaatccaggggaacaacttttttcactcatcaagactgggtaaaatatatctctattggctcttattataactttaacaaaaatttgtctgcctatgttgattacaaaatcaacttagtccatgacacccccttcaccaaatatcttgatgtcaatacgaataacgctgtgggtataggtttggtatatcaattctaacaatctgaaatgaattaggtagattaatagaaaatccaattaacatgtgtatggtgctcacttaaagtgagcactacttcttccaagaagaatcattatcaggtatctgttaaaaaatgatatgcaacatatcgacaagcatattagtaagttacgtataagaaatatgattgatgaaataaacaccacattttactctttttattaagatcaacaggtaattttcttccgccactaaccgcgagtcatttttcacttttttgatcaactggaccaaccagagattaaaaaacaatctctcatttacattttgaaacactttatttcacatttttactaaattttcttttttatagcattttgtgagtggataaaaataacaaccaatgaaacacttgacagcgaaacagacgacactaaactctcacaaatagttccgtagatttttaaagaattatttttggcagtggcaggtgtccgaataacaccaatgagggtaataataatgatgaaacgcaatgttcttgcagtagtaatcccagctctgttagctgctggggcagcaaatgcagctgaagtttataataaagacggcaacaaactggacctatacggtaaagttgaagtccagcacaaattcgctaacaacaaaagtggcgaagatggcgataactccttcgcccgtctgggtttcaaaggtgaaactcaagttaatgaccaactgaccggttttggccgttgggaatacaatatcaaaggtaaccgtgcagaaggtactgacgaagaaaccaaaacgcgtttagctttcgctggtttgaaactttctaactacggttcactgaactacggccgtaactacggtgtggtttatgatgtcaacgcttggaccgatgtgttgccagtatttggtggcgactcaatggcgcagactgacaacttcatgaccggccgttctactggtctgttgacttaccgcaataccgatttcttcggtttagttgatggcctgaattttgccctgcaatatcagggtgaaaatagtgaaaacacggctaatagccgtatcaaccgtaaagacaacggtgatggttacggtttctctgcaacttatgacgtaggttatggtattagcgtcggtggtgcatactctaactctgcccgtacttctgcgcaaaaaactgcttttagcgttgttgaggaaaaagggaaaaaagacaaacctactggctctactgccttgggtgatcgcgctgaatcatggaacattggcgccaaatacgatgccaacaacatctacctggctgccatgtacggtgaaacccgtaatatgactcgtttcggtggaaatgttgacggtgtaaactgggaaaatatcgctaacaaaacccagaacatcgaattgaccgcccaatatcagttcgacttcggtttacgtccatctctggcatacgttcagtccaaaggtaaaaatctgctcggtgacgatgggaaagaatccagcagccgcgatctcgtaaaatatatttctgttggtagttactactacttcaacaaaaacttgactacctatgttgattacaaaatcaacctgctggatagcaatgaattcaccaaagcaacgggtaccagcactgacaacgttgttggcgtaggtatgatttaccaattctaattaccgttggtaaatagatttagctgaacaagttaaacatcattaagagaaagcagcgcttatgtgctgcttttttagtcttatattttctttctttttctcactccgcaaactgcctcacaagattatcttctttttacgacaaatagttggcaaactgttttagcagcgttaacctgactgcccttttgggcttaactctgagctttggaattacaaacatgtttgagaaaatcaccgcagcgcctgccgaccctattcttggcttagccgatagtttccgttctgatcctcgtacaaataaaatcaaccttggtatcggtgtctataaagacgaaacaggaaaaaccccggttctgaccagtgttaaaaaagctgaacaatatttactggaaaacgaaacaacaaagaattatctgccgattagcggcttagccgaatttggccgcgtaactcaagaattactgtttggcaaagatcacccagttgtcacagataaacgcgcccgcacagcacaaagcccaggcggtaccggtgctttacgtattgctgcggatttcattgccaaacagactaatgctaaacgagtttggatcagcaacccaacctggccaaaccataaaaacgttttttccgccgctggtctggaagtctgtgaatataaatactatgacgctgaaaaacacgcgctgaatttcgaagacatgctggcaagcctgtccgaagctcaggctggtgatgttgttctgttccacggctgctgccacaatccgacaggcatcgatccaaccccggcacaatgggctaaactggcagaaatgtctgcggagaaaggctggttgcctatttttgatttcgcttaccaaggatttgccaagggcctaaacgaagatgcagagggcctacgtatttttgcgaaaaatcataatgaactgattgttgccagctcttactccaaaaactttggcctgtacaatgaacgtgtcggtgcctgtactattgttgctagtgacagtgatacagcagaaaaagcgttcagccaagctaaagcgattatccgtgctaactattccaacccacccgctcatggtgcatctattgtcactaccattttgtcaaatgaagacctgaaagcagcttgggaacaggaactgaccaccatgcgcgaacgtatccagcgtatgcgtcaactgtttgtcaataccttgcaggaaaaaggggcaaaacaggatttcagctttattattagccaaaatggtatgttctcattcagtggcctgacaaaagaacaagtagaacgtctgcgtgatgagtttggtatatacgctgtcagttccggtcgtattaacgtcgctggcttgacgttagaaaacatggctccactatgtgaagccattgttgcagtactctaaattaacatttacctcacgatgaaaagtcgctgaaattcagcggcttttatcattcagaagattcgatgtccgacacaattgtgatattaatcttattgagtacatcggaatgaagttgaaatccttgaagggccagttaaacgtaccggagcaaacggagccattatgtccgtttattttcgtgatctggatcaaaatctgactgaagtctccaaccagttatagttgccatcaaacaactatcagccagccctcaaattgacacttataccctatggatttcaagatgcatcgcgacggcaagggaacgaatccccgggagcatagataactatgtgaccggggtgagtgagtgcagccaacaaagaggcaacttgaaagatgacgggtatattgaatataaacgctacaccacatcaccaacttggtacttcatcctgtaaaaatggattagtctgccgctcatgacctagcgtcgacattggtccgtgccccggaataaattcataatcatcaccaagtggcagaagtttatctttaattgagttaattaactgccggtgattaccgcgtggaaagtcactacgcccaactcctcctttaaatagcacatctcccatgtaaatcagcttatctacatgattcacaaacacaacatgccctggcgtatgtcccggacagtgcaatacagataagtcaacgccccccacccgcagctcatcaccttcatttaaccagcgatcaggttcaaatgatggacattcttcaatgccaaacatccgactttgagcttgcaagccttcgatccagaaagcatcttcctgctgtggcccgtagaccggcgcattaaaatgtttagcgacctccgctgttgcaccaacatggtcaaaatgaccatgagtcaataaaatctgggtcaatttcagaccacgacgttctatctcggcgatcaatttttctgcttcaccgcccggatcaacaattgccgcttccttactatcttcattccaaataagggtacaattctgcataaaagcagtaacaggaataatttggtatttcattatttcatttactccatagtcaaaacaaaatagttactcaccagattaccacgtcctgacgggacctgtatcaatatgaacgaaattactgtgtggatagtatcctacccctcccgctttcattttcagagcagccttgcagatacgactaagctcaataccttcaatatgaaaatccatcgcccgcccgcgagtatggtaactctgtttagccactcctttactttgcttgcgcaactgattgttggttaccagtgaacggtaaccagaaataagttgtacaggcttattaatctctatcatcatttgcagcaaataaatctgatcaaataatttaggatcgatagtcttaacgctattttgacggtaatctcgaaacagatgatccaagcgggccagctcttctttgttgtaacgatagccgtcaaaaaattcggctttaatcgtttcacccgtatgtaagttgtcaaaacgtaaaattcgtgggcgtggagtggccagagtggcaaaagtatgccccggcaacaaactcaaacctaaagcagcggctcccgcactaagccacttacggcgattatgatcgataatatccatgaagaaacatctacccaaattatagaaaaaataggccaacaggcaattggtcactggtcaatatgacaattaataacaaaaattagttgcatttagttttgtaaaggtaacaactttgacaaaaactgggcaccttgtctcacactattgtcgtaatcataaatatcggtacggtactgaggtaccccctgctcatctacccaagcagttaaataatgcaaataaactggaatacgctgtgggatgttaacataaacggtattgccctgtttcagggtattattcactttactctgatgccaacctacatcttccaataacatacttgctaattctgaagccttgttaacccgtacacaaccagagctgatcgctcggatgtctttgttaaacaagttatggttcggcgtatcatgcaaatagatagcatcagaatttggcatattaaatttataacggcctaatgagttagtcggccccggagcttgccatattcgataaggaaagttagcaggcgtaatcacgttccaatcaatagtgtaagggtcgattacactggcatcagcacgccaatttgaaaagataacgtatcctcgccgttgaaaatatccgggatcatcaactgctcgtggtgcgatatcttttcttgccaggctagttggcacactccagggaggattaatcaccacattattcagcacactactcataatgggtgtcttccggcttggacgaccaacgatcactttcgagtccaacacttcctgatcattaagataataatgcaatgaataatcgggaatattgaccataattcctgtggacacatctcctgggataatacgtaaacgctggatattaagcgccatcaatcctgctctggtttgaggcgaagtatttagccaatctcttgtgcgtttaccgattacaccatccggagccaacccttgccaatgctgaaaattttttaccgcagtcaccagttcaggattgtagatatgatctgattgagctgtcagttcgttcaacataccaagacgaataagtatttccttcaacacagcaacatcagcgttattctgtcccggttttagcgcacttttaccagaaagctgtggccacggtttactatcagccagttgtttcatcatctccttgcgcatattttcatattgcggatgttgtggtgccagtgcagcgacataagcggccacattatgatcgataatagcttgctgccactgatctataacgactggtgaaggtaatacaattttgtatggtacagtgcgatagagccagcgttggccctggtggccgacatctgagacaaattgtaaataacctagcatagcatccgataagatgagatcacgtcccatctgactcaattgagcatcattgagttcaatcagccattgaccaaattgcggctgaaacccagccaatgccagttctgaaagttgttgttcaaaccttcattccgcacctaattcaggaataaaccgctttatattgtgcacctaataaactcaaaagctcatggtggtaagattgcattcctgtcaccattttatgttcttgaaattcaaaggtgctgatcccttcaaaggccagaaatacccaacgcgcggtgggggattgtgtcggtttgttcttcatatcggggaaaaacggcacattttgtttcaattcatggcgaattttatgttccagcgccgcataaaccatgagacaacatgtcatcaccattaacagcgcttctatccgctccggttttttcaggaaaatggcagacgtcaggaattccggacttttcaggaagcgaaaaccccgctccaccttttgttgtgccttataattagccagtaacgccgccatatcaagccgtccttcatcccgttcattggtcgctaaaataaacctcccgacccgcaatctggcctgcttcaccttgtctaaccgggtataagcctgaccggctaattgataatgaaccgatttggggggttgatgcttgccgggtttcccgcgccccgcatacgcggtaatcgcctgaatttccggcgaggcgatgccgataaactggcattgagactcaaaatcatgcagtgcctgtaaggcatcctcccggcaggcaaagggctttttgcccagtttgtcgaactgtttagactcgttttctgtttccctgagtgtgtttttccggaaagtctggttttcacgtttttctgccgccgtactgttcaccagtaaccaacgctgaggaacgccgccatatgatgacgtcacccagcagcctgaatagccctcactgatggggctgaattgctccgctgtcacgttcaggagagactgtttagcttccttgatcgtcaggggaacacgcgtaataaatcgttgtttttgctgatgaagcgaagcgatcgcggcttcagtataaagggcggcatcggccacaaagtagcggctgttttgtgctgctttcaggcattgaatatgggttttgatcgtctgggcaaaggctttggcatcattcgtattcccgctcatagcctgcatatagacagggatacctgcctgattttcgcaaatcagttcaaggacaacctggttcagttcaggccggtgatcccggctataacccggcaccagtgcaatacgttttgtgtcatctcccaatgcgctgtcatagtcaccatcgacatgaaaactcgtgatatccaaatgaacggaatcgggatttaaccctaatttatcaaccacttgctcagcaagcacctgataaacttccgacacccccgcttcatataaggcatccagtgtacggccgagcacatcatcattaaggtgttcagcttcaatgtcagcaccaattaaacgcgcaatcggcttatgttgaaaaaagccggaaaacatgtgcaatgtccggctgtgaaaccccagcccgttaaggatcatcgccagaaaagcgtcgccgtgagagacagtatgcgatgaatattttgggataatggcatcaatcatgcggggtaaaccggcttcatgacaaaaagcggcgataaggccaagatgatcgagacgtttaatggcaggtataggtgtggacatattcgctttccggcaaataaaagtaatagatcaaaattggcgattaccgtcaaccccaccgatgtcatcaatacaaaaaacctgtgtaagatcacattatttttaaatcagaaatacggtgcggaatgacggttcaaagcgttgaaccgcgattttatcttgccacaaaggttgcatctggttagaggagtacaaactaaccaatcggtcaaagaaaaccggcttaatttttgccggtaaccagcttcgcagcattttacggcgttctgtttctgaaattgtagcagtttgaatttgtacgcgttcaggtgttgttgtctcagatatcttttcaatctgcatttttggcagattttgaatatcaccttcaataagcctattctgatgattagctaaagcatatccagctattatcaatgtgctacaaataaccgaaatacacagtggctttatcgctctttttaccatatcaacatccccaccttcagaacattctcatgagttaattttaattatgacaaactcaaactctaatcaaagaaaaacaacaagttatttacattgtaaactatttacctacaaaggaaatataataaaccatcgccaacccaccaaacacaaaacagcaaaaaagacgccaaagcatctcgtctatcattcaaggtatgcaaaccgctttcttaattcagcagaaagacctacctgataacaggcaggcccttaattcaacgctattcctacgataatttctgatttactacatctgcttactacaacctgactggtttactacagcgcgactatcatgatgaagaagtgctatcacatgaggaagtaccatatgcagcgagaaatgactgaacagcgatagcaattcgctgagatttctcctctggagtaggtaaaccaatgcccaaagtagccttaagccttggcgttccaatgatgccatcgataaacacctccgcggagattttcgggtctactatgctcaattttccttcctccatctttcgtaccagatattcgacaagaaaatctactatctttttgacccctttttcataatagattttacctagttgcggaaaacgttgggcctccagagtgactacccgataattcgcaatcattgtttctgaaagaattaccgagaaaacttcctctgcaaaaatggttaatgctttcccaatatcgggttcgggattcatggtcttgtcaagaccgccttcaacttcttctattctctgcctaacaacagcgactaacagctcttctttagaaggaaatcgactataataggttcccttcgaagcattagcacgtttcgccatctcactgatactggcaccatcaaaaccccgttctgcaaatacttgagcagcaatttttaacagctcgttaactcgttctcctgaaattctagagtacgaacgggttcttttgtgatctgtttgggctttaggtgtatttgtcatgtaaaaaaacctaaatttttattggtaccgaacggtacggtatactattattaagactatagcagtaacacaacccgatggctgtgatcaaatggtcctagccagctacagtcaccatgattctttcagaatcacatcgtactacttatggagaaaaaagaaatgaacgttggaataattggctcagggattggtggagcatgcctggcacatggcttgcgcaaaaacggaataaaggtgaaagtctatgaacgaggctctgctacatcatccatacttcccggttatggaatttacgtcgatacattcggtcagcaagcaatgcaggaatgcctcccagaaaccaactggctaagctttaaaaagatttcaaagcctgttggtggacagacaagattctatgatgaacatctgcatcttcttctcgcagctcagagagatatttaccaagaaaatggggaaatcattaccgaggatcggatgtcaattagcagatctgaacttctagaagtactcaatgagggactctcagataccgttcaatggaacaaaacgttcgagcgttatgaacacatgccaagcggtaaaatcaggctttttttcacagataaaagtcacgaagatgtcgatgttcttatcggtgcagatggaagcaattcaaaagtacgcaagcagtacctccccgcgataaaaaggctggatattggcgtcacgctcaccgttggacgtgtgcgccttacccaagctcttgctgactcattgcctccctatttgctggatggttcgcccaacaatattgtgccgaaaagccccggtggattgtttgtctctctatggcgtgctccaatcaatactcaggtaaaagccacatcgacagaaattggcgattttgtcatgtgggcctatgcagcagcaacgaacagctatccgaatacgattactgattttcctgcgaaatctctgtgtgatctgatctgctcccgcattgcttcatgggacccaaacctgcataccctgattaaacaaagtgatatggaaaacctctctgtgattccgttacgcagtatggatcacctcttaccctggcgttccagcgctgtcacgctacttggtgacgctattcacaacatgacgccaatggtcggaatgggagcaaacatagcgcttcgagacgcacttttgctcactcaaaccctgactcgggtagcatccggtcatgaagatttaatcaaagcgatttcagattatgaacaacaaatgcggacatatgcgaatgaggcggttgagatttcattacgtaccgcgttaaatgcagccgatcgttcgatgatcaagagaatactatttcgaactgtacttcgggttgcacaaactttaccgccaataaagcgagtgctattcccgataacaaaatctgcgcaacaccagggaaaaataaaattaggtactacacactcttttagtagtacgcaataaagaggctttcactttaccgccagacaacttgaataaacgattagcaaagcatttgcggtaatattgcgtcggctcaagaatagaatttggttttggtaaaccagtgagaacctctttttgaaaaataaagacttgataaggcagaatcgattatttaccatcgtatcggccggaatatctttgtctaaaaaatataataaaaatccacgcccggattatttggtaggtttttgccaaatttacaatggcttaaccctatactatccgggccataaaaacttaagggaattatgcgtttgtaaatctattaattctgtcatttataatatccagataattaattgataattaatgaaaataattaaaaatcaattatcattcttagctacaaacatcaatgttcagcaatatttaatcatttaacctggagtatcattatcttaaaaataacaaacattccattaatagaatcagataatgaattatagataaatttattatcattattattcttatattttcattattatttccgccacacctttgtcattaagcgctcagaggataatcggcccgcaagtttttcttagctcattcaacacattctcacgacatgtatcacacgtttctagtttccatatcccgactgattttcatcagttaatcccaacattaaacagagggcagagataacgactgctcaatggcattctcaatgccagacaccgcggtaaccaccagcatcaacataccaccgatcatgaggatcgaagcgaacagaaacccacgcgtcacgatctggactttaatgatcgtttcatccagccagtgccgggcgaactttgccattgattgatcaaatccctgtaaccgcgacaacagccgcagataactgatcgcctcgttatcaggaaaacggtaaccggtatcgcgcaacgcctcaccaaaaccggctcccattgagatgtgttcaagcgtggccgcgatacgcacatacaaccagcgtgaacccgcctgttccagcaacaattctaacgcagattgcaacatcatccctgagcggatcaacaacgacacattcagtatgaacatactgccatgaatcgttcgatacagtgaccacggtggaaaccggtcaagccccgttcgcaatcgccccccaagaaaaggtaacgataatgctactaatatgaacaatatcaccagaaatatcagtgaatagagcccatagtcattaacaaatgtccccatcaaatatagggtataagccgcaccatcccaggtttctggcttagaaaccgcagccaatttcggtaccaaactgcctgctacaatgtgcaacaatacacatatcatcccaatgagcaccgcaggataaatagatgcaccaataaccgcactacggatcttactacccgcttcgatcatggcgatcgcatccatgaaagcactacgtatatcaccggagcgctcacccgcggcaatcaccgccacttcattaggaccaatccattgcagcaaactctctgacaaagtgctgccctggctcacagattcatagcaactactcaacaccaacgcataaccaccattaggcttatggccttcgtcgctggcaatattgtacatttcacgtaatgcatcaatcagcatgacacgattctctagcatcataatcagatgctcatagaaacggacccgcactttcttactgaactgtatcttcgccattcgataattcagtctggcaacaaaatcggtcattgacatagcgttttactcgatttgatagctcaccgggacaatcggccccatcacacgctctccggcacggggatcaatcattccgtcatttattttgcgaataagtgcatcgatcttactgataccgcccatctccataatccaatatcgggttgcctcatgatgatgaccggttcgataagcttgcattaagccaggagaagtctgaaccacttccgccacgacggttcggcccacggtgccgcactgtttgcaatagtcacagccctccccctgtagacaaaccgattccggctgacaataaagattcagccgtttcagcaaacgctcggagacttcttgctcatgcccttgcaggggaactttacaatgaggacataacacctgaatcagcgcttggctgaccaaaccaatcaccagccgcgaatccattaatagtgacgccatcaccgcctcatcctgcaagcggggcaaaatcgctaaagcatcgtttgcatgtatcgtggtccaaataagatggccggtcatggcggctcggaaagtcatctttgccgtcactgcatcgcgtatctcaccgaccataattacatcaggatcgagtcgcattgcatcagcgattgccattgcccattcttgctcgataaccacgctatcaccccgatcgccggtgataggcgattgattagccccttcaatctcatattcgggagggtcttcaagtgtcagcagatgaatgccggcctgctcggttatcatcttctgcatcacgactttcaaagtggtgctcttgccgctacccgtcgcgccggatagcagcaccacaccggcccgatggtccatcagctcttccaatatctgacactgttccggcaaatagccaagatcgcttagggtgcacacggtaccggggctatccgcgtacagcaatcgcaacaccattaacatgccacgatcaaggggacgtgtgttaatccgtgccccagaaagcccgcactcggcaagaaattcatccttcattcgcgcacgctgtgcttgcatcggcttaaacgtcggctccgccacatcacacatactttggtaaatcgtcgcacacagccgcaatccttcctccgggcgcaactgtcctactggccgtaaataaccatcaatacggcaacggatctcacaataattatgacgagcgacaatatgtaaatccgacgcgcgttcctcagtggcttcgccaattaagcgaatgatataacgctgaacatcggattccgttccgcctaatccatgactatgattgtggcttttgttaagacggtataattccaatatgctccccattccacaggtgacaatctgatagatgaaaccgtgtcttttaaccgtttcctcataggccagcacatggggatcaaggcgatgggaagcagacaccgccagcacacactgccccttttgcagaggcaactcaatcagacagatcaaactacggttcgctaactcgatttcaagtgcaccgctcagggcggataaaacttttgcgccctgcctgaccatacacagcagatcggagcttgttatttccataggaaaccgcctactcagcaattaacgacttaacggcaacggtggcgctaccataaaatcaagactatccaacaacgatgcatcgttagttgcggtaaggcccacgtcatagcatcgtccttgtttagcaaaagtcaccacccccgtattaatgcggatcaccttataaccattcggtaaccaatcacccgctttcacatccataatgccccccaaacgaaaccggagcgtggcaatcaacccaccgttacgtccaaagattgacttaactaaaggcaaatcgttattaacagcactgcctctattcacgattctggaaattttatcgagttcagcctgcgcatttgcccttgcagtttcggctctaagtaacatcaaatctgtctgtaatttctccaactgcgccgcaacgctattgttcgccgtcacctctgacaataccggtttctgtgcaacaggtttcgcctgaattgctgaacgctcagtggatgatacttgtgcatatgccaacgaaaataccggcaccatcaacagactgatcataaactgactaattttttgcatagaaaactccattgagttcccactgaggaaaaccatcagctaacaccactttggcactagtgaccctcaatccaggaaaaggcttacctgaaaacaaagcatctggaggtaactgagaagagagcgtccaactataagtctgccaatcgggattggcccacacctgtgtctctccctctgctctgggaggcggtggtggtggcaaaacggaagcactctcagtcaaaaccggagggggcaaatctagcgcctgaaaataagagatcaattcaatcaacgcctgatcggacgactgcaatacatcatcattatctgcctgatcctcactctgctgctcaatcggtatcaatacctgtgcctgttctcccccattggagatcaccggaccagcccggaaaatattgatggcagcaacctgaaaaatattgatcggcatgccttcatgacgttgataactcacggaaactgtatcagtatccaaacttatcgattcaacctgccaacctgccagcgacaagggcactctggctaacactctcttccatatagagaattgccgtgccatttgcggttgtgcaagccacggatgcggtggtagggtttccaccacctcacggggtaaatccggcacttccaccaccctattctgcttataggtatgccacatccaccaaccgccccccaacaaaagtgttaaaccggtggtcatggcaaagagcttaatttgatacttcgacatttcaccggttaaactttctagctgaccgacagactttttcaatatcgatttcgataatagctgctctaatggcatctccggccacagcgattcaaactccttcggtgcatagatggcatgccacaccccattagcgtcctctactaactgtaccgtctcacgcaacttcgtctcgatctcttcgcgcgttccgatcaaatcacgtccagccatgattgcaccctgatgtactgccactaacgcataacacgcatcagacaaacgaaacgcgccgatccagttagatttatccaccactttagccaaaacagcagccaatgaataataaccgggttctcctgcctccttcggcgcataaccaacctgaacacctcgtccaacacgatggcgaacggccagggtaaaccccgctgcaatcccatttctgcgcatgttagcccgcgccagtacagctaccggtggccgccagatgatgccagccaccagagtcttaccatataacttgatttgcatgacatgctccacgcctatttcggtcatcttttaatctaccactataggcgtaatcatgaccacgatcacattatgattccttttaccctgacggctccctcccaagagctgattatccgggctacctaaaccactgcgatcactggtatctgactgttgctcgaaccctgataacaccagcgtttcacctgaatgcagccgcaccttctgactgaatgcgcgtaaatctatcgtcggcaactgcacctgaccggtctcttccttgccaaatttctccagcctctttaaatcgctcaagctaatgttgtactgcaacaatatttgcttatcagccatagcataaggcagcatcaacatattaaaacccgtcgtcactgttgcgggctcaatccccaccgaagtaccgacttgtggcgttgaagtattggaaatggatgcaacataaccggtctgagttgccacctgcatcggtactgcctgcaaattcaacgtagtcaccgaaggttgcgtcactatggatactttgccttgcgctgataacgccttaattagcaaagtgctgtcactgaatggtcctttgaggatatgaatattggtactgactccgccgtcatcaataacactattcccactctcattactcaatcctatacgagcacttttataagctagcgaccaatcgacaccatactgatcagcacgatcgaaagtcagattcaggatcttgacattaagcaccacctgcgtggtcagcaatttattctgttgatcaatgtaatccttaatcctatcgagtacttcgggcgaatcggttaccgccagcgatgctgtcgccattgatagcgttagcttaccttcccccggcgtcagcatggctgataccgttttttggatctcatccatcaccgaacgggtcaaagaagttgccagggtttgagtactaccgctattaccactatcgccctcacttacgccactgccgaacgtcgcactcgtcgtcgcggtcacgctggaagacaatgcatccgtacccggcaatgcatatatttgaaacacccgcgtctctgttttgaaaatatgcactgcaccattatgtactttccaatgcaaaccggacgacgaaacaaccgaatcgagcaaccccactagcgatccatgccaattcacatgaattttcaacacttccggctccccctctccagataccggcggtgtgcctgaattgaccaccacaacacctcgttcactccctctttcacccgatgccgaaccgggatagacagcaagccgggcatcggcgctgatcaccaccggtacaccgcaaatacgtttgatcttatctgcaaactcacccaaggtaattggctcagcttcctcaagggtcaaccggcaagagacggtttcactctccttcttcgaggggatctccttagttgacacccaataaccatgttcatgcacatgtaccgacattgcggcggcactattacgtaatcctttaataatctcagtcgcttgcgccatctcggtatctgcctgctgatcgaccttctcgattgctgcacaacctgacagtccagcggctacgcagggcaacaacaaccatctgtaaaacgtcaaaaactgaatagccatgttattacccctgagcctgtacatggacaagccgctgttcctgataaatatcgacgctgaaaggacgattcgccattgtgtaagcgtcgaacaacgcactcaccgcctgaatgaacgtgccactgaaacgcagattagcccggatcggaaaatcataggaggcatcccacaccacctcataaccggacctactggcccacacttgtataacatcacgcagcgtttgccccgacgttgctgtccacactaccgccagaggaaccgatgttggcactggtgtggcgtaaacggcgacatttgacagagagacaagcgccataaaaacagatgcgattaatttattcatcgatctttctccaaaggaaaatcagcagccaaacaacccattaatgggtcagtcacccaaagaaagcccgcttgcggaatagcaaccacaatatttccaccagctacaatatttccaccagcgccccgtcagaaacaaattcccgaacatcacccggtaatcgtctggcaagttggttttctatgcgttttcctttgccatcgataagccaagagccacgcttgaaaccgatttgatcgggttctgctccccatctcagcaattccgcgaaagccccgtgcaacaacacattgtcaccggcactgatatttttgcggaaaatatagacatgagcccctgaaataaatcccccccagagacattgactggaaaaattgtcacaccaagcatcggtgtttacccactccatatgcaaagtggttaatgcctgctgcatattccgacgcctgacctttccttgagcatgatgatcaagtaattgcacaccggctgaagcataactacgaaacagcgctgcgacatcggtcctggcacgcactgactgcacacgcacttcatgcaacaactgaccaaaaatcaattgcataaaaaacacaacgacaacgctaacaatcgctaatggccacattctcgttctcctgcaaatttaaaaacgtaaaaatccacccaccagaaaaatcaacattgaacacagccaatcatccgttccctataccctgtattccgtactctattttccgtcctctatctttccatactccgtcctctgccttctgtcctctgccctgcggcatctttccattgcaaaattgggataccaaaacccgcatgctggcaaatcaacaactctccctgtttactcatggatacactacctaacgctggacatcccccaccggcaaaactgcctgttttcgtacttatcaccaagttattaccaacaaccacgtttttatctgcatgaacatcaccggcagccaaggtgcctttcctcgcgggattagcattaccatccaaaataaacaacgtgccatgtgttggattaacaaccattgcaccatcattaccttgcgcgatataagattgtttttgctgaaaacgggaagcgaaagcgaccttattcaccccctcaaccataccggttccttgcatcgacagcgtatcgacctgatcaaggcgattgccactcatgttgatgctggtctccatcttattccactctggatgcccatctattttttgccgatgaagcaaatcaccggccaaagtaccgggaccataagttgatgcatctctaacaaatggggcgtaaaaaatacgcccaatttcagtaggttgttgattgaaaaaaccggcaaaagatttcggtacattgacctgaccataactgttccaataagtgactggattgttactgtcacgatcttggtaatcgagatagaggccgccaacgccaatcaattgcacgattttcattgcatgttccgccacatccggctgttttccgccttctattgctggaacggtataaatcagcggatcgatgcgttttttgccattaggcagcacaacgacacgtaatacgccatcatatttctgaccaagcggattgaccgtattttgatccaatccgggtggcaaataagggcgcatctccgcccaatggattggtgccgacgtgggcccatgagttaaagcggtgtaattattattgacataatccaccacggcatcgccgaggtgctggatttgcccggctaccacctgatttaccaacatgtcactctgcctattcagataaatcacaccaaccaccatcattgacgccagtaccatgagtgcaatcgtcacttccaacagagtgaaaccggcattacggcggcgtatcatcaatacagatacagacttaccatcatgcataaacagcccttcttatttataaagcagcaccacggctagctaccgatgacaaagcgcgacaattaatccagccactgccagacccggcccgaaaggtatctgtggtgttttaattctgcgtaaccaccgcattgccagataacttaccagcgtgaactccaccgccagcaaaatcacaactggaagcgcttccaaccccagccaggcaccgagcgccgccagaaacttggcatctcccatgcctaatgcatcgcgccgagtcaatcgccgggcgatccactcaaccagccggaaaaacagatacccacaaactgcgccaacgacagccaaaggcagcgcgacaaaaccggcggatggcaaattaaacagcaaccctagccataacaaagaaagtgtcagttgatcgggcagcagcagatattcgaaatcgactactgccagtacgaccaacatcgaactgagcactaaaaaccccaacaacgaataactccaccccaactccaaagccagtaaggaaaagagcaccgctactgcgccttcaaccagtggataacgtatagaaatcacacctttacagtatcgacagagccctttttggtgcaaatagctcaacaggggaataatatcgcgggccgctaacacgtggctgcaacgtggacaatgggaacggggaaaacagagattaaagctggcaacctcattattgatttcagagaaaatcatcatcggcaggcgacagatcaccacattaagaaaacttccgacgcacaaccctagcaaccctgatgccagcaccaaacacccagtagaagattgcaaccaccctatcatcatgatgatctcccggcagattcagcacacaacgattggataagggaaacaacaacagaaccagagaaaccagctacttccctcaccaagaaaatgcagcttgaaaagccttcactaagcttgccaagccacacgtcatatcaagacatcaatcaacgtcctaactggcagaaaccagcgtcacggtattcgcatcattggcattacatgccgcttcaatttgcgccaaagtcgaatctgatttaatttccgtggctgactgttgccctttcccacctccaccacccacggtcattttcgaccaacccgccactcgcaatttcagcgaaagttgctggcaagcctcatcaggcacattttgatactcaatcttaaaagtctgagcggtggtatctcccggagaaatggttaccttgccattccaactattaaaaataatcccggacttaccatcctgagtcatattggtcggcaccactttgtaattaatagcaattttgttatccaaactgtcatagcctttggcaccatttttaattgacttcaaatttgcggccatctgagtaatattcgacgattcggttgagatttccgaagcccgaaacaacttaccaatccccgcggcggcggcggctaatatcacaataccaacaatcatcacaactaatgcttcaatcagcgtaaaacctaattgacgcttggcaccacgcaatacattgactttcttattcatgctgataactccaaaatcgaaaaatagatgtgttacaactcgttattaagaacttttgccgatgaatcactcacatacttacaaaagaaataaaacatttacgttatgatttcgttgataaaaatatttataaaactttaatgtttcattatgaaattaatactataagttatcatttagaaaataaaattgtttaaatcgttcaaaaatcacgcaattgatcgataaaaactatcaaatttattaatttagatcgcaaacatcgattaaaactaatgatacagctcattaaaaaatcaatggattttattctgccaatcagcggaaaataacaattgataaatattttttatatataaaattagcttgttgttaagacttactgttgtaccaagctgtcacagatcacattttcgtaaaaataggacatacaacagcgttctttgctaaagaaaaacacctttcaataaccaaggcttttttaaatgccgacaaagaatttttgctagttatttattgagaaaggaatagagaatttaagcttcaatgaaacaaaatcaactctaagccgatatcttaaatcggagagtgtggttctttgacttgacaaaactataataagtaaaaaaccacctccattaggaggtggtgcagtttaatactgacaattaaaaagatcaatttgctatcgatacctttctttgcaggttattatcaccgactaaaatgccgccagcaaaaagcaaagcatcttcaagtaacaattcacttttatcatctgttttttctaacacgaaattatatacgtttaatggatcagtgtttcttaatttaactgagctaagggtagtttgaccatcacgtgtatatattgtatcaccgatcttaagttcatcagctttgactattcctcgtaatgttgcaacaggatgcgttggagtcagtgaaactttttcatcgttattataaattaaatcaacaaattcagtatcgtgacctacaatacggcttttcacttgtaatacaccaccttgctttgttagaactttatcgcctgaacgtatatcttcaaccttcttcttagaaccatcagccatatctattaatgtaccttcagcaatacaaccatattggatgttaatgggtgggtaaatgaattgtaaatcagacggagtacttccgcccttattagtataagtgaattgaataggatatgcttgcttatcagtctcatcaggagttgtgagaatactagcctgtaaatccaatacatacctctcgttattcttccagcatattgacccaaaattagcgtaacctgagcctttggagaaatcccatgtcaatcttttaccgctttcatcaaccgtcacatgttcccaaaatatatttttatcaatttctcttgctttacatccaccaccagtatcaaggccaaccagcgtcaaatccgcgcctattggtaatctcttggttcccttaggctttctattctcatcaatcaggatatagtcatcgaattcaacactgccaatgatttccatgttgatatgtgtattactatatggtatctctggcgtcattggaccataatcgcaagcatcgggagctccgcgttcaggatttgatctatttaagcaaacgattattgggcgcatatgctgtaaatactccttataaccagggtccgtgttacatatcttcttttttacataatcaggtgcattaggtgacgtgttacacatctcttttggaacatcgtcgaaataaagtatatttgatttcatgataattggcccgtcactgagacttattccatttatttttccctgatatgttgcaacagcgataacagaagattgattaggattattaataccatcaagtatatcttcttcagaaacggcttccgttgtatggctccgtacttccttaccctctatactgcttgaacctgatgcgattacctgtctagattttttatctttatcaagtgcaaaaaccacaagtgagtcttggaacgatgaaggaagggaaggatcaggatagtaaagagaattaaaaactgtagctgaaattgatttataatctttagaaggtatgattacaggctgcccgaaaaaattctcaggatctttattcgagcgatgtatttcaagcgatttcccactcttaatcagtgcatgttgctttgcttttatcgtctcaatatctttaaaaacatcaggatgcttctgttcagtaataccactgtagcgtaacagtgctctatagcccccctcatgtgaaggaatagttaaattgatcactttaggtttattaggtgtcttaatgctttctaaaagttcagatatagccttattatcctctatagataacgtatccagtttcgtatcagcaaggcatgagattataggggtgagcagtatggtaaaaaaaataaatattcttttgtatagagtcataatttttcctatgaagtaataaaaatttcttaagtcagaaacattacacaaactttatttaaaatcgctatttattgaacttaactgataggtaactattaatattatctcttgaaattattaattaaagggaaagtatattaaaaccaaaaccacatatataattaatagtcacttataataaaacatcaagatttttatattttctttctttatgaaaaatttttagcgtaaatatctactgggatgtgtattcaaacattgagtaagtgttattaactttaagcacagcagacatcccaataaaagtttactccagataattaactcatcataaatttcttccttcatagtgaaataaaaaagtcacaggtacttaatatcacccactgttttcaataatcagacttaatctattccaaactaaaataatgaaaaacttgctatgagcatataaaaatgtcggttctgtaacattattaaaaaatccatcttgaatcactttattaattaatgataagaataaaataaaaattatttccacaaaccaaaaaatatccatcatgaataataacctttaaaaatcaggttattgcggtagccatacccatattttcaatgctagtaaaaaaacgatagagcttttcttagattttaaacatcaataactaataaaggaagaatcatggctataactccagaacaaatcgctgttgaatatcccattcctacttatcggtttgttgtttcagtcggtgacgaacaaatcccatttaacaacgtttccgggcttgatgttcattatgatgtcatcgaatataaagatggcatcggtaattactataaaatgccgggccaacgtcaatcgatcaatattaccctgcgtaagggggtcttccctggcgacaccaaactgtttgactggattaattctattcaacttaatcaagttgagaagaaagatattgcaattagcctgaccaatgaagctggcaccgaaatcttaatgacctggaacgtggcgaatgcattcccaacgtcattcacctccccctcttttgatgccaccagcaatgaaatcgctgttcaggaaatagcactgacagcagatcgtgtaaccattcaagcagcttaataaggagagattttatgaccacaataacaacctaccccggtgtttatattgaagaagacgcttcgctgtcactctccgttagttccagtgcaacagcagtgcctgtttttgctgtcgcaggtgacaatccattaatatcaggtaaaccctatattcgcattagtaactggctggaatatctgacactaaaaaatgaacaatttgatcctgccaatacacttgatatctcactgcgcgcttattttattaacggtggtggatattgctatctggtccaaaccacagatttagaaaaacaagttccaaagctggatgatgtcacattgctggttgctgccggagagaatattactactgctgtaagtacactttgcaaaccgggcaaaggtttatttgctatttttgatggtcctaccacagagttaaaatccgatggcacatccaacagcgattatgacccaaatccttttgctgccgtttactacccctggttaaccgccgattggactactactatcgatattcccccaagtgctgctattgctggtgtctattgctctgtcgatagcacccgtggcgtgtggaaagcaccggctaatgtccctattcaagggggattacaacctaaatatccggtaaccgatgacctgcaagcacaatacaaccaaggtaaagcactaaatatgatccgcacctttcctaagagcggcacactggtatggggcgctcgtactcttgaggacaacgataactggcgttatatccctgttcgacgcctgtttaacagcgcggaacgggacattaaaaacgccatgagcttcgcggtgtttgaacccaacagccaaccaacttgggaacgggtacgcagtgccgtcaataactatctgtatagtttgtggcagcaaggtggtttagcgggaaataaaccagatgacgcttactttgttcaaattggcaaagatatcaccatgaccgatgacgatatcaaacagggaaaaatgatcatcaaaatcggtatggcagcggttcgtccagcagagttcattatcttgcagtttacacagaacaccgctcaataattggaggcaacatgccaacaataccaacttatcctggtgtctatattgaagaagatgcgtcattaaacctttctgttaatcaggggaacacggcaatacccgtttttattggcttgttttcgccaaaaaacaccaacctaaaatcacaagtaacacgcgttaatagctggctggattttactaatctgttcaatgcgggttgtattgcaccaatcacaattaaatcaacaaaacgggcttcaatgcctgccccaactcttttagagaacgttaaaggtgatacagcagttgttgctactcctggtatctctgttgatgcagacaataaagatcccacttacacttacaaggtaatagttaactacacgaccagtagtgatgccctaaaactttatttccaaaatggtggcgggccttgttatatcctgccacaactagataggttaactcagggatttctggactcaatccctgagttaattaagcaggctttagaaattaccttgatcgtctgccctgaatgggattctggttaccagagcaaaatatataacagtctgacatcttcattattaaatgccggctatttccttatcgctgacaaccaggataaaaacactgcactcattactgaagtagcatcacaaactgcgacgtattatccggcagttaaagtctcacaacttatccaagcagaagatagccagatagcagtatcaggttatgaagatgcaaaaacaaaatccgatgaagtcaaaaacctggcgcaactcaaagagaaaaacccaactgtctaccaacaagcggttcaagcaatacaggacgaaatagccgccaacggcaacatcattcctgtcagtgctgtcatggctggcatatattgtgccactgatgccagccgtggcgtctggaaagcgccagctaatgttgtactgagtgggatcagtgatgtggccgaacggcttactgatgatgaacaaggagagatgaattccaaaggcatcaacgctattcgctatttcagccacaaaggttttgtcgtatggggcgctcgtactctgcaaaacgatgacaactggcgttacattcccgttaggcgtctctttaatgcggcagaacgggatatcaagcaggccatgcaatccgttgtctttgaacccaatagccaacccacctgggaacgcgtgaagtcagccattgacaactatctttattccttatggcaacaaggggcattagcgggaaataaacctcaagaagcctacttcgttcagataggtaaagatgtcaccatgtctgacgacgacattaaacaagggaaaatgattgtcaaagtgggcatggccgcggtacgtccagctgaatttattatccttcagttttcacaacaggtagcacagtaatcgtactgaggcgcggttaaacaccgcgtctattcagtcgttaaggagatgataatggagataacacagccgagcgtcaccatcacagaaaatctgatattcccaaagcaaaatgactcgtttatcggtataccggtttttatcggttatacctcatcgccggtcgataaaaccgctatcaagctccacagcctggccgatttcgcccggtcatttcctgagtcaggattaatgtactattccgtgcgccatttctttgaaaacggcggtcagcaagcttatgtgctgtcactgggtacggagcaacaattaagcgatttttcgtcattaatcactgcgctgcaacaagcgtggctggcacaaacgattgccgcagagaacgacattaccctgattatcaccccagatgttatccgctttgatcagacagaaatctccgatactcaacgcgatctctggttacaactttggcaatcggtgctcaatctttgcaagagccggcgcggtatcatggggttattggatgccccagacgatcccacattagccgctaagtgtttacaacagttttcttccgctgatcgacaatggggcgtcgtatactggccgctgctaaaaagtgcctatcaggataatacacaaaaccctatcgtgctttcaccaaccgccgcagtggctgccgtcatccagcgtaacgataaccaacaaggcgtctggaccgcaccggccaacatcgcgttaagcaaagtgatcagcccggtacgcgcttatatcgaagcgaatgccctgtttaacccggatggcacctcactgaatctggtccgcagctttcccggcaaaggcatcaggatctggggatgccgaacgttggaaaatacccacgactccccctggagttatattcagacccgccgtctggtttcctatatcgaagcttatatgactcaacttggccgagccttcgtctttgaacccaacaacgctatcacctggatgaaattcaaaggtcaagcccacaactggctacgtcagttatggctaaagggtgggctacggggcacccaagaagatcaagcatttgaagtattactgggcgttgacgaatcaatgagagaagcggatctgcgggccggaaagatgatcatcaagatcagactggccgtgttaattccggcggaattcattgagctgaatctgacatttgatactcgtaccggtaccatacctagctaaacaggggcaaaatatgcataacctctataccccgtcagtatcacaccgttttatcgccagttttctgtttaacaatatccctagcccactggatattgcctttcagcggatatcgggcctgagccgcgaactgcaaacgacccaatacagtcaaggtggagaaaacgccagaaatgtctggctggccgaaaaaatccagcatggcagtctgcatctggaacgcggcgtcatgacggtgacaccactcactctgatgtttgatcgcgtcctgcggggcgaaaaagcggtttatgccgatgtcgtcatcatgctgctgaatgaaaattcagtccccgtggcaagctggacgctaagtaacgccctgccggttcgttggtccactggcgactttgatgccaatagcaatgccgtcttggtgaattccctagaattacgttatcaggatatgcgctggttaggagtgaaagtatgactgtcgaaattaaagaattgattattcaggcaaaagttaccgattccgcaagtgacttattgtccccgcgaacattagcccaggaggcgctggataatgcccgtctgattgagatggtaaaacaggaggtgttagacgcattgcgtgaagcaggaggccgttatgagcttaattgaacgcggcttgtccaaactcaccctgactgccttcaaagaccgggaggggaaaatttccgtgggaagtttacaggcgatgtataaccccgatgccattcaactcgattatcaaacccattatcaacaggataaaagtgttaaccataccagaaaaagtagtcactatgtgtcatcgccaccggctggcttgtcattagtcctgctgtttgatgcttccatgccaggcaataatatcccagtagaaacacaactgacgaccctgaaagccttatgcgccgttgatgccagcacccatgtgccccacttcctgaaaatcaaatggggcaaaatgcgctgggaaaacaaaagctatttcgctggccgggccagtggccttaccattaattacaccctgtttgaccgggacgccaccccactgcgagccagtgccactttatctttggttgcagacgaaagctttgttattcaggctactgagcagcagttaaaatcaccaccggtcaccacaatcagtgtgacagatatgctcaccctgccgttgattgccttaggcgctggcgcttctctggcaagcgacattgattatctctcccttgcctggcaaaacgatctggataatcttgatgacttcaccccagggcaaacactgcaagcacaggagaaggcatgaaaatacctgagataaccatcaagataagcggcaaaaccctcaatcaatttacggctatcaacctgacagtaaaccactacatcaatggtattccctcggttaacatcactctgggtatcgccggcgatgctaactatatttttgatgccaaagcacaggctgaactggcaaactgccgccccaataatgaacttattgtacagatccaaaaaaccatattgtttaaagggatcattgttcggcaagcacttaagttcaaaggccaggatagcctgatgaccttgacggcaaaacatccattgcaaaaattaacagatggcctccactcacagctattcagcaaacaaagtgatgaagcgattatcaagaagctattcagtcaggccggtatacaaacgacgataaaacaggcccctcagctcaaaaccgtgcatgagcaaatggtgcaatttcgctgtaatgactggacattcttaaaaagccgacttatcgccactaatacctggctgctgcccggcaatgaagtcgttacactgataacacctaaagcgctgaatcaatcaactgtacatacgatccatcagagcaccaacgatcaggacattgtactgtttgaagcaaacttgcaatgggataaccagcgcagccccaaaacggtcagtgtacagtcctgggacattacccaacaaaaactgtctcagacaattcaggtgaagaatagtgggcttggcagtaataaactagcggtagacagcataactacactgaccaataaagactggcaatgggtttttaactatccactggataatgagcaagctaaatatcttgctcaaggcattatggataacctgcgaagtgataacgtctccggtagttttgaagtcgaaggtgatagctgctatcagccgggtgatgtcctcgcgctgaatggctttggtcaggggatggatggtcaagggattatcaccggcgtgagccagataattaatcagcgtcaaggctggcgtacccggttaaccttaggtatgccgccagatgcagaacaggcagttcctccggttaaagagttgcatgttggtattgttgaaaaataccaaccagacagccagtcactgggacgtattccggtcaagataccggcgttaaacttaaccaacagtgtactttttgcccgcctgggtaagccttatgccagccatgaaagcggattttgcttctaccctgaaccaggagatgaggtgattatcggtttcttcgaatgcgatccgcgcttcccggtgatattaggttccatgcacaacccgaaaaataaagctccggtagaacccagtgaaaaaaacccaatgaaaaccttagtcatcaaacaaggagatcatcaacaggccttagtgttcaataatcaagataaaactgtcgcgctcaatagcggaaaaaacacgttatctctgcaacaagataaagatatcacgcttaattcagctaacaacctcatcaccaatgctcaggaaattaaaatacaggccgaaaaatccctgtccgcctcaggaaaatcgggggtagatattaaaggagcaaagattaacttaacacaataataaggcaatgaaatgacaaacaaaatattagccgatatttatggtcggggctgggcatttccgccacagttttttataggtgaacgtattccttatgaagattatagtagtgatctgaataaatatctgagtgaaaaaaaaatcgaagctgaacagatagtgaaaatccaagcttgtataaaagagagtgtaatgtgctacgacttccacgcaaaaatcacatctactcaggtaagtaagcaaacaaatttacctaatcccctgaatatattggttacctataccttaggagacagcgaaatcagccaaaaaattcaaggtgtccttcgtgttagccaagatgatccgccacagttttctataaaagacaactctcggactggcatagcaatagcagaaggcacccaaaatgttctccagagtataaatattctttttctgacggaacccggtgaacgaattatgcgtgaagactacggctgtggtctgaatgattacctgtttgccaatatcagtgatgaattgatgacagacattcaaacccatattgaagaacgggtattacgctatgaaccacgcgcagaaattacctcgattcaagtgaaccagagaacaaacttgcccagcactctacatgttcaggttacctatgcgttgagaggcagcgacatcaaccaacagattgaaggcgtccttgaggttaatgaaggccgggtacaggtgagcttatgagtaaacaactggtgattgatggcgacaacctgctattcgaaccattgtttggcaaccggcaagtcacaattctgggacctgcgaccattcgaggcagcggacacgccaaaatccaaggcaaaaaaatcgttattgtgggtgacgaaaaaaaagtacagcttcaagcgcaatatattacccctagccatccgatacctggcatgggcatagtcaccattgcccagttagacgcgaaccagcaggtaaacttttgtcgtactcccgccacggcaattgttgtcgggcaacaatttatcgcccgttttaccccgacccaacctgctaataatccgtcaactggcccagatgtgacaacgccgagtatgggcaaaggccgctttattgccagccaatatgcggtcagtgccgggtaaataacctcttcaaccctatttttaaataacaggtggaataaatatgggacaagccgagttagataataaactctctgctattgtgccagatactgtatttaaacttgatgaaagaagtacactggatattttaaactggcttaaagcttatgctgaaaaaatccctttcgatcaagataaaaatcaattctgggatagtttttactttattcaggaaaatactcctgaagaattagaggatatttaccaacatgctaataaagcagatggccttttaccgccacatcaagcttttgtttttgcttttttaaagttattagaaacatccaaccgattattaaataccttcccggcccgacaccgcgatctttattaccgggaattactgggactaagccccagaaaagcccaagcggatagcgttgctttaggcattaccttaaatacagataacgcagaatatcttatccctaaaggaaccctgtttgatgccgggcaggatagcgtcggcaacccattacaatatacatcagaaacagatttactagcgaatcaaggggaactgaccgacctgcgttggtatcggaaagataaggatagctggcaatcgacaatacctcttagcctctcagataacattgcattacctgaaaatggtattcaactttttagcccgacagccaatgatgtggcagtgctatccggttatctgattaaatcatctttattttctatgcccgaaggagaacgccatatcacattgacgctggaaaacgattgggaaggtcaagctgaacatctcaccgctaaaatcagtacaggagatcactggttatcgttgtcggtaaatcctaatcgtactaacaaaaacactattgagcttgaattatcatccactgatgatcctatcagcccgccagataatcttgatggcatgacattcgacataccggtattaaaactaggcactactcagaaacccatgttgcccaaaattaccgggattgaaatcaatattaacggcaaccgcagtgtgcgctatgcctctgatggtggtatcgaacagacggataccaccagctcccccttcggtcaatcaccatcactgggttctggttttaatctggttgccccagaatggtatggcactgaaaacgcaacattgacgatgactcctcaatgggttggcttaccgacaagcagtttttcaacatggtatgacaaatataatccgaaacctgccagtaatggggtgttcaaagtacaaggttacttagtcacatctcaaaagagagacgttcttaatgatgctaaatctcagccattatttgatggaacaggtgccccacaagggcaaagcctgacatttatcttgccagcaatgcattatcccctcacagacagcccatcgcccaacgaatggcctgcatccgtgcgcatagaattggccgaacaggattttatgcacgcccagtactggcaaaatcccacggataaaaatgttccttatacaccacaaatcagtgcattgcagattcaattcagcactacagctaaacctgaacaattcaccgtttacccgctgacgccttttggttgggcaaacacaaacgaagatcccccttcattcactaacgacgcactctatttgggtttcactaatgtgttaccgggacaaactttatcgctatattggcagttagagggctttaaagcgctcaacttatcctggttttatctcaatcagagcaacacttggggttcattggatcagctagttgacgaccagacccataacctgtttgaccaaggtacctggcgcacactactgccacaggacgcgtcaaatcaggcaactctgatgccaacaggacgatactggctgaaagcagaaataacccatcaggctgaatctcaggattacccaaaaattaaaggcatactgtacaacgccgccacagctaccttaatcaatgcagaactcgttgaaactgaccactttatcaatggattacccgccgacagtattacacaaccggtcaatgcgttagttgctatcgatagtatcaatcagccttgggtatcctggaacggccgcccggaagagacagaacaagcctttctgacacgggtttctgcccggttgtcccaccgtaaccgggtactgagctgggataacattgtcactttattgaaagaacaattcgtcagcttatttgatgttaaatacccttctgccagtgagttaactaaaatcccggcacagaaagaacaacaactgattgcgatccccgacagtcgctacaaagataacgatgatgcgctacgcccgattctgaatccggcccgactggcggaaatggtcgactggataagccaactcagcagtccctggaccaccctcaaaatcaacaacccgacctacgttgacgtgctgatcagctatcaactggtgtttgtcacagggattaatcccgactacggccgtcatcagttacaacaggaactcagtcgaaaatatatgccgtgggcagaagatagcgctatcggcgtcacaaccggtaatcgcattgattactacccattattagccacgattcagcagtcacctttagttgaacgagtcaccaacttaacgttgaaaaaatcgtcccaaaccgcaggagcagtcggcgacagtgtagaagctgctgataatgaagtactgattttggtttggtcagaaaatagttccactaataaaggagcagacagtgaataatcaagacgccctgtttcccatcgttaaagacgatatcgcctttgagaccttactcactcaagctaagacggtcattgagcaacagtctgggcaactctggagcaataccgaagaaaatgatcccggtattaccttattagaagcctgttgttacggcgcatctgatctcgcctatcgccattcgctacccctgcgcgatttgcttacccccgaaaaacaagagcagacactgggtgatggcatttttccacaggaattcggcccacaacaaatgctgacctgtggcccgatcactgcggaagattatcgccgggctttactggacttacatagcagcgacaccgacaatgaaacaagtgaagattattttttctttaacgatgtacggcttatttgcgaacctgaaagtgaacgttataagtactggtataacaaagaaagccgtgaatacagttttattcaagaacaagaacaagaacaagaacaagaacaattacagttaacactaagaggaaactattggctttatttacttcccaaccgggaaacggaagatgataaaacactgactcagaaaaggctcaatgatttcctaaaagataaccgtaatctgggggaatccgtcagtaaaattatctggctgcaacccgtggatttcttattgcagcttgatattgaacttgatgatgatgtcagtgatcttgctgatatatttgcccaagtttatatgacaacggaacaaatggtgcttacaagcccattacgctatagcacccaagctatgattgaacaaggttacagtaatgaagagatatttgaaggcccttatttacatcacggttggataccggaattatcggcggctaaagattacaccaagccgacagaattaaagctcagccatctggctaatcgtttactggctattcccggagtacaaaatattacccgattggcattaggcaagcatgatgaaaacatttctccgctggcggacgatagttggtcctggacaatcgctcaaggatactatcccaggctatggggtaacgatcccttagacttaatttcctcatcagcaagcccactcactattaccgccaaaggcggagtaaaaatcactgtttctaaacaagatatagagaacaaaatcattgcagaacccttgattgaaacacagcccgaattactaaactggggcaaacatcgtaaagtcctggattactatccagtcagcaataagttacctgcctgctatggattacagacctatgcggagactcaacaacaagtgcacttgcaccaatttatgttgccttttgagcaaatgctggctaatggctgtgctgaactcgctctcttgccgaaactgttagcatttaaacaacggggaaatacggtatacggtacacaatggccttttaaagcgaatactgtcggtcagcaagtccatcaggaaatcatgcccgatttaatcaaacaactaaataatgattcccaaattaacagtgatgacggtatccattcacaaaattacacaaaagaactatcaatcctgaattacttattggaatattttggtacccatcgtgcggccagaccactcactctggattcactggattttctctctactcaacgtggctatttggcacagcaacccgaattaacctatcaacgtaataacattcgtattgataaagtatcagcgcttcagaaacgtattgctgcccggcttggtttgggaggaaagtgtttcgaggaaacctcaaagctggatgaacttcctttctacctgattgaacatcgacagttattaccggtaaaacctgacacgaaattcgacaaggagcaaaaacccgataagctgaaaataaaaagcgtacccaattctaaaaaccaacaattaatcattacccaaaatgggacaacgggccagctattgtatggtcaggtcattaatctaattattaaagaaaaagaaaatcaagatattagagtaaaattcatattacgaggccaaatgatcacagatattacaggagagtcatttattcttgacacccgtaatagcacggctttagcacgtagtttgatcgacgtacagaacgcatataatgacggtaatctatactggtgtaatagcccggtatggatggaagatatggattatcaactggtttatgccagtgagatatatcaaacgggaacagaaaatgaacgctggattacctccagcccccaaagtcccttccctgccatgatcgaagaaaatgatgaaattacactgaaatatgtaattaccccatccgggccgaagaaatctgatcatgaactcaaggcaaacgtcattaaatttgatcgtattcaaggcaagatattaattaaactcacccaggactcacaggataattttccattagcggcagacgcctggcgctatcgttggtatttctccagcgaaaaatatgctttagccgatcgcttttcatttgtagtcagtatggtgattaatagccaactcgttaaaaatgacgacgttgatccttacaaattggaatcttgggcgaaaaccgaaattttggctgaatttcccgctcatctttccatgattatccactggctgtcaccggaagattttaaagattttgtcagtacctatcaacgctggcaaaataatggcgctcccttaggggacgaggcataccatgttttagaaactttaaccctgggaagattaccttctgccgcaacaggtattggtaatatgagaattgctaccgcacagcaacgtattggtgtggttggtgaatccggtaaagaatggaatacagaagtgattattagtaatcagttagtgtatgtaccttatactggagaaaatttaaataaacgctgactttaatcatgaatatagaaaaatatcgattaaaaacgctcatgtttaattttcaaatgataaagaaattaatttactttaacaaaataaatattaaccttacattaaatcaagtatcttttttaattttcatttaattataatgaaaaactcataatcatttcacattatacaaaaggtgatataaatggaaaaagaacataatccatataattcagaaaccaatttagaaaccaatttagaaaataccaatattaaatcaacgggtccttcagccgatgatttaaaaagccgttttaaagaaggcagtattccattacaaaccgattatgccgacttgattgatattgcggatattggccgccgggctgtaggcaaagcaccagatcaaactaataatccaaattcagcgttggaactagatgacaactctgggctaaaaataaaaattaactccaccggcggtttaaaagcagatcaagacggattaagtgtaaaacttaaggataaaagcttattagctgaccctaacggattagcagtcaatgccggtagaggggtaaaaattaataacgatcagcttgaagtcgatggttatcatggtattgaaatagttaacgaaggtgtaaaagttaaagcaagtaatgggattaatgttaatagcgatggtgtttcagttaaagcgggtaatggcatttctgttagtggaaagggagtggaagttaaggctaaagataaaggtagtatttccgttgattcggatggtatagctgttaagtattgggatggtggaggtattgtagcaactgataattccggtctctatttgaaattagaagggggaaatacaaacaatggttggagtggtgtaagtggtttgagcctgagtaaaaatggtgtaaaagtcaaagcgggtaacggtatcacggttgattcaagcggcgtcagtattgatcccaaaacagtactccctaaaggaatgattgtgatgttttctggtagtagtgctcctactggatgggctttttgtgatggtaatcatggaaccccagacttaagaagccgttttgtcatgtgcagtgaaactatttctgaaacagggaaaagcagtaataaagctagtgggagtggaaatggaaaaaactattccagaaatacaacatcaacgacggtttctgttagtgttactgtgaaaaatacgacattaacagaatcacaaataccttatcattaccatattggaggtatgggttattggactaataagggaatgaaatatggtaccgaatattacagcgagtatgcttcatatatacgtaatgatctggatagtgtaatgcaatcagccaatggcgcgagatacgcatacacatcaccctcaggaggaggacaaggacataatcacccagcaacagcatcatccccttcacatgatcatagcgttaatgtaattccaccttattacttattagcctttattatgaaactttaattctattctacaaatacagatttaaattacctattatttactcattaccaaggaaatatcaatatgacttcggagccaaatctgttaaatcggattaccattactattgaggctaacaatcagcaggtagctaagaaagtattgcatggctccctgcttaatcaagccaatataaataacttattcaatacattattcactcaatatcctattaataaggatatctatttagaaacattaaccttggatcttggcgaaataaattttcacgactttaattcattgtttcctgctcgcctcaaggttgcactgattaaagcactaagccaatatcagataaataataaggaagaaattcacctgaatgcaccaataccaaataaaatcacccataattcttctttatctggtgataataactttattaatgcagagaatttcattcacttcttatatcaaaaagatccccaattaaatccagcggaggcaatagcgaataataaaaacagtgatatcaagattaagaaattaataaatcaattaacacgaatagacaacaaatcagcattactattagcaaaaagctgtttatctgaacatagcctgcaacggcttttaactatcaaacaacccgctttattgagcgccatcaaccgcagattatccgaaaacataaataaaccacaacaccaagaggcgcttgcctcctccgggcaactgatactcaatgcactggaatatatacagcgacataatgcacaggaactagttaaacccgatgcaaaaatcatctcgcgtattacaactgagctcaataacggtacacttaatgccgcgtctgttattacattatttcgccaggctatgaccgacaatatcccattaaatagttggctaaaacaactctggcaaacagttgctatttcacagctttgccaacagcacctgtcggttgaagaacaccaatatctattggcatgctttataccaaaccacacggataaaaatagatctgagataaaaccctccatgggtggcgataactcttcaaacgatcagaaatatcaacatccgacaaatcaaaaagtaattgccgaagatccgcaagcattatcaatatcagataacccatcggttattagaggaaataacctcaacccacttcaaaccatcaacaaaccatactctgaacagactttattacctgaacacctttttccacgcccagtaaataatgccgggatattaattttgtggccgatgctacccgcactgtttaatcaacttggcctgctcgaagcacagaaatttatccatcatcaggctcagttcaatgccgttgatttacttgactacctgatttggggcaccgaagagagaccagcagaaagaaaagtactgaataacgttctgtgtggattaatggccgacgaaatgattgaattaactcctgttgagccggaaaaacagttgataatagatcaatggctggatgccgttatcagccaacttcccggctggaaaaaattaagccgtaatgatgtccgtcaactgtttttacaacgaccgggtgaattactggcagacgagcaagaaatcaaaatctccatccagcatcagccatttgatgcgctgttggctgattggccgtggccattaaatatcgccaaacttccctggctggatcgccctttaaagattgactggaaaaatatttagaaggtttatatggattacccgctgataaataaccacgatataacggcaaaatcacactggatttatccccatttagaacgtatcgatttgcggttacagcattactattatcaaaaatgtgataaatacgattccttaccggaaagttttttactcgcagaagataaattagaacaacgtctggcaagaccacagggcattccccattggctaactaaaccagatgatattatcagccacccagcagcaaaggaaaatactgtccctgatgcattgtcattattagtcgaacgtttcgaactgactgaatttgaacgggataccttgttattaggtttattgccgcattttgacagccgttatcatgcactatttgctgctctcaatggtaacagtaaaaaacagtggccgagttttgctttagcgattgaattatttagccaatgtcaaagtgatcgacaattactgcaaaacagttttttaccgcaaacaccattaatcaacaaccaactactacggcttaataatcaagaagaaccaatctggttacaaacacaatttttaactcataactcggtatggcattttttatcggggcaacgagttattctaccgccattaataacctgtgctaattggcatactccagccccacataattggtatccgcaaactctttatcattcatttaagaaaatattattgaatgacaccaacgaaatacagccattaatcatactcagaggaaaacaggacagcgccagagaattagcagtcagtaatattatggcatctcatggcatcaataccttaacgcttgatttagcccttctgccagatgacgagaacccaacggaaataactcacttgctagcggatacaatccgagaaacccggctacataacgcttgtttattaattcgcaatttttctttgcttacagaggcaaagaaaatattacatcgcaatttatctattttgttgaatcagccgaaattacgtgtggtttgcttggcagagccgggagatatattagtctggattaagcaccaaccaatggtacaaattaatatgcccattgcgacattggcggataagcaaaccttgctaaaagcaagcttaccggagaatatcgcgcaaaaaattaatattactcggctttgtcagcgcttctcttttaccgcggaaacattaccactcattgttgaagaagcacatcaataccaaatgattcggcaaccagaaggccagctggaagaaactgatttacgtaaggcattaagtttccgtgctcaacaaaattttggtaaattagcccaacgaatcaccccaaaacgcagttttagcgatttagtggtttcagatatgttagcgcaacagttaaaagagatcgtcgcagccattaattaccgtgaccaaattctaagcgctggatttcaggaaaaaatcagctacggtaccggtattagcgcgctattttacggtgaatcaggtaccggcaaaacaatggccgcagaagtgattgccgggtatcttggcgtcgatttaattaaagtagatctctcaaccgtagtgaataaatatattggcgaaacggaaaaaaatatctcccgtattttcgatctggccgaagccgattccggggtactatttttcgatgaagccgatgctttatttggcaaacgcagtgaaactaaagatgcccaagacagacatgccaatattgaagtttcttatctgctacaacgactagaaaattatccgggattagtgattttagccaccaataaccgtagccaccttgacagcgcgtttaatcgccgctttacttttattactcgttttacttaccctgatgaaaaattacgtaaaaaaatgtggcaaaaaatctggccggaacaattgacactatccaatgaaattgacttttcccatctggctaaacgggctgatttaaccggggctaatatcaggaatattgctttattgtcatcaatattatcagcagatgataactgtcaacaaatcgaaaataaacatatagaacgagccgtgatacttgaattaaataaaacgggacggctagctttttaaaaacttagtagaattggagtcaacatgacaatcataattgcttctgataacgcgattatcgaaattaatcaagcattaaataccattttatcccaatatttaaatattactggtcagaatattgatattcgttttgatctacccgaaattaattccattcaatcagaaccgacggtcagtgtatttctttatgagatacatgaagatctacaattacgttctgccgaatcaagacgttataacccatcaactaacacattattaccgggatgggtcaatatcaattgtaactatttaattacctactgggatgccagtaagccctccagtgacagctccagcccagacagccaacccaataatcaagcggcacaagtgatgactcgcattttaaatgcattaattaacaaccgtcaattaaccggtcttcccggtgcctataccagaattattccacaacaagaaaacctaaacagtctgggtaatttctggcaagctctcggtaatcgtcctcgcctttctttactttattccattactgtacctatgaaattgaaaaatattgaagacaatgtaatcccagtcagtaaaatatccgcttctgtggaccaaaaacccaatctggataactcacaaataaaccaggctttaatagataaattatgtgtagaattaggcggtacagaagatgtacgtcttgccttggctaaagtgaatctgacaaccaaacctgatacagaaaataatcaaaatcaggaaaatgaaagtgttattgttgaagtttcgggtattactagcgtaacttatttaccacaaataaaagatacacttaccaaatggaaaagcagtcaagaggctattgttaagataaatggtgttagcattgttgtttctaaagaaaatgctgataagctaattgggatttaaacttaatttttatactaaaataacaaacaatcattcacctaataaataattatataggataaggcgatctctctaaaattcatgaaaaaatcaaaaaagtattgaaaaaagaagacacagaaccattggaacttataggcgttactgttgaaggaataatcgaggaaatgaaaaaaactgatgaaaaatatggacaatatgaatacaaagatgaagatataacgagttatcctatagcttggacgaatcctgataatggaaaaatttatataggaataaattctccagaatactcgcatttgaataataaaggagaatctgagctcaatttggcaaaaataatatctacaataattcatgaaagccttcatgcgtcatcacatcagcataaaggcttacagtctcaaactgatacaggagcagacaacctaaactatgatgaatatgtgacagactattttgcaagagaagtttataaacaaatattacccgataaagactatgttgccaattgttttactaagggattaggcggtgaaaataaaatatggggaggaaacattgttgaatttatgattcaataaaaacatgcctctttggaagaaataagataagcttatacagaaggtaaaccatttaataaactagatggtaaattactagaggattggaaaaaatatgaaaaattggggaaaaatacctgacctacctaatcaaaattaatggatgaagttatctcagtcagattaattatagagtcttaataaataaaaaaacaatctctcatatgaatattgaagtacaaaatatccagtgagttatttaaaagaataccaatctatttattttcatagtcatgcatattgcacttgccatgctaaatcttgcaatatatttattaaaataatcataaggtgataacatgttcagcacatattctagtaaaaatgacaaccaaacaataaataaaataaacacagaagaaaaacatgaaaacacagaaaccgataatcacttggaaataaacttagagcatacagggaaaagtaaaccggatatagaaccaaaagatgtcactacaggtaccattaatgcaggtactcttctatataaaacgaccgctatcccagagtttttagacaacgcaaagagcctgggtttagcagaatatgagaaacgacataaagatatacaagattacttaaacctaggtaaagctgaggatgctgagaaactcaaaaataagtcacagtgggcagggcaatatttcgccttagaaaaaagttatgatgaatatgcaaatgaagcgccagatagctacaataacctactgaaaaacgctggaaaagacctgctggaaaatacagaagaagtcaaagttttcttgtacacatttaaagtaacaaaagatatcaaagttctcaaaccacacaacaattctaattcttactatgtaggcgatacagaaggttgggaaaaagcaaaagagataatgaatgatgttcaatctcaatccgaaaagaatgacaatccatttcccgagttaaaaaacctagaagacaaaaattttctcctggaagaacttggagagaaaggatatgcatggatggggccactccatgcaaaagaaggagcagagaaaggaactgaattctcttacgagctcgcaatcagtccaaacttattacgccagcacctcactttggaatcagaagaattacttggtacctacaagaaccgatatggttattgggacaagaagtgagatttttaacttcgcaaaaggaaactgtaattttaaaacctatcattggaaaataaacctttcaaataaataaaaaatctacagataacaaatctaactataataaaggatttataaatatgccaagatattctaattctcagagaacccctacacaaagtactaaaaatacccgtagaacatctccatcatcaaactcttctactgaacatctttcactttcaaatgctccgactaatgactcctccgttcgccaagaagttaaggaaaaatttatttgggaaggtcattgggaaggtcatatggaggcaattgaaaaagcgtccatacttggtaattttgctgtcagttttcgggccgcaggtaaaccaacactcgaagctttgggtaaaggtgccgcagctaagggccatgatattctggaaaaaaccattaaacccggttcaattgaaaaagcatatcctgaaaacgaagcttcagatgtcataaagaaagtgcgggaagcgggtattgaaggttatgtcggtcactggaataaagaaacgggacgtctcgaaggtatttatatgagcagcggtcacggtttaccaaatggacaggtcaatgggaaaatttatcccatagatttaaacaacctcgaagcaagtctggctcctttaaaagaaaaaaagaactgggctgcgctgcctttcaccggtgattatgatatgcatgacatgattagtttcaccactcagccacattcagtgccatccaattcatcagaagaaaaaaaaattatcgatcgcattaacgaatatatcgctaaatctgattcaaaccggccatttgaagatatagaacataatgttatcaggcatggtcctcaagtaagctatcctgcttttgcgatggataaagaaaaaaaagagataaaggaacgcgggggaattgttaaagccgttgctgaacccggcgaatttccggttgctatcgtcagtaaagggaaatggacaattgccaataatatcaatgaactggagcaattctataatagtattggcgcaaaaatgaaagcaagctggaaacccggcgctggaaatcccggattcgtttccaatccacaaaaaccaggaatggcccgatttagccggaaaaaataaaataaattattattacgtcaacaacatcctgcaaaataaagaggattttggcctattttatgtcactcaacattacacatgggaaatctttaatacataaagatctaacagaatttcctgaaattgaagcagagattttgttgctgcctaaataacacttcaaaataagtaatcatctggaaagaactcagacaaatttttgcgatctgaacatccaagattaacggaaatataagtaatcgatattttgacaaaaggattatcattatgcgaatgcaagttaaaaactgattgaaatgaatggctttcataaagtagttgttgtaaatataatattttctcgtttttccttttctgatatttgattctttaggctcttctattaatgcattcggtaaagatttgcctgagaaaatatgcgaagatgttttttgtaacttggtaaaaacactataaatggtaatgactaactaataagacagagaaacagattgtggcaaagaaagaaaaacggcctcaccatgacgcgctattcaaacattttttaacacagcccgaaacggccagagaatttctatccctttatttgcccgaagagatccagttgttgtgtgatttagccacattgaaactggagcccggcagttttgtggatgagcatttacgtcaactgcacagtgatgtgttgtactcggtcgaaacggcccggggacagggctatatctattgtctgattgaacatcaatccacccctgacccgttgatggcctggcgactgatgtattacgccatgttagcgatggcggctcacctgaaaaaaggccatactgaacttcctttggtggcacctctgctgttttatcatggtgagattcggccgtatccttactcaaaccggtggctggattgtttcacgctccccgaacaggcggctcgcttataccgtcaggcgtttccgttggtggacgtcagtgtgctcagcgatgaagagatcctgacgcataaaggggttgccctgatggagctggtgcaaaaacatattcgctgtcgggatatgcaggaatggctcctccaattggtggaactcttgaatgcggggtataatacaactgagcagcgcaatgtggtgttacgctatattttactgaatggacatacgccggatctctcacaatttgtccatcaactgattgaacaatctccggagcatgaaacgatgttgatgactattgcagaacagcttgaacaaaaagggcttgagcgaggtatcaagcaaggcattgagcaaggtattgagcaaggtattgagcaaggcattgagcaaggtattgagcaaggtattgagcagggtattgaacaaggtattgagcagggtattgtgcaaggccgagaggaaggccgagcggaaggtaaactggaaacggctcgtgccttattacggcatggcgtgagtttggacattattgtcaccagtaccggactgagccgggataaaattgaaacgttaaagcattaaattaatcttctctttgtacagcaaaatgccgatatttaagatcggcatttttgttcttattcaggatgatggttacttttacgtttgcccggcgaagctgaaaccggtcagactgaaacagcaatctccggagcatgaaacgatgttgatgactattgcagaacagcttgaacaaaaagggcttgagcgaggtatcaagcaaggtattgagcaaggtattgagcagggtattgaacaaggtattgagcaaggtattgtgcaaggccgaaaggaaggccgagcggaaggtaaactggaaacggctcgtgccttattacggcatggcgtgagtttggacattattgtcaccagtaccggactgagccgggataaaattgaaacgttaaagcattaaattaatcttctctttgtacagcaaaatgccgatatttaagatcggcatttttgttcttatttatagggagagaaatgacaccttaagagcatggggaatgcgattaggtgagctgtttgcggaaacaaaataacttgttctgtttcgtcaaaaccttgatgttcatgcgcctgatgtaaccgtttattattgatttttgcatccgaacagagttcataaaaaagcaaaccataggctcaatacgatcttttccactcactcttttgatcatcaattaatcgacaaaatagaaaataatcattcattcataattttcctatccccaaagccaaataaaaccgcgcttaatacctaaaatgagtaactcctaccataccaattaataattatcacacactattaattaatattccctaaaaatattcattacttataatcaggccgctttattaaatgcgaactaaataatcgcgaaataaatcttttcagcataaataataaccgccataaggcaggttgctgcggtagctatagccatagctcggagcgaatcaaaacctcagtattaatcaaaacaaggctataacgctttgtttatcttttaaacgtaaataaccaatcaaggaataaatcatgtctacaactccagaacaaatcgctgttgaatatccaatccctacttatcggtttgttgtctcaatcggtgatgagaaagtcccctttaacagtgtttccgggctcgatatttctcatgacgtcatcgaatataaagacggcaccggtaattattataaaatgcccggccaacgtcaggcgatcaatattacgctgcgtaaaggtgtcttctccggtgatactaaactttttgattggcttaattctattcaacttaatcaggtcgagaaaaaagatatttcaattagtttaaccaacgaagccggcactgaaatcctgatgacctggagcgtggcaaatgccttcccaacttcattaaccgctcctgcttttgatgccaccagcaatgaagtcgcggttcaggaaattagcctgaccgcagatcgagtcactattcaagcggcttaagactcatttataaagctgtttactcaaaatattgcacaataattggaggcaacatgccaacatattcctatcccggcgtttatattgaagaggacgcttcacccgcactctccgttcgttccagtgcaacggcagtaccagtctttgctattacaaacaacagttcattaatatcagataaaccctatattcgtgttagtagttggatgaactatttaacactaaaaggcgaaccatttgatcccaagaatatccttgatgtttcactgcgtgcctattttattaacggcggtggatattgctatctcgtcaaaactaaagagttagaaacacaagtgccaaaacttgacgatgtgacattattgattgctgccggagaagagatcaacgaggtggcaggaaaactttgtcagccgggcaaagggttatttgccatttttgacggcccacaaagtgataccgatataaaagaaccagaaaaagctctcaagccttattcccctacgccttatggcgcagtttattacccttggctaaccgctgaatggggagaaaataaagccgccattgatattccacccagtgcagttatggccggtatttatgccagtgtcgataacagccggggggtctggaaagcgcccgctaacgttgctattcagggcggcttacaacctaaatacccggtaaccgatgatctgcaaacgcaatataaccaaggcaaggcattgaatatgatccgtacctttcctaagagcggcacgctggtttggggggctcgtacacttgagaacagcgataactggcgttatatcccggtccgccgcctgtttaacagtgcagagcaaaatattaaaaatgccatgaatgccatggtatttgaacccaacagccaacccacttggaaagccgtccacagcgctatcgataactatctccatactttgtggcagcaaggcgggttgatgggcaataaagccgaacaagcttatttcgtccaaatcggtaaaggtctcaccatgaccgatgacgatatcaagcagggcaaaatgattgtcaaagtgggtctggcggcggttcgtccagccgagtttattatcttgcagtttacgcaaaacatcgctcaataatcggaggcaacatgccaactacaccaacttatcctggcgtctatattgaagaagatgcctcactggctctctccgttagccaagggaacacggcaatcccggtttttattggccgtttctcaccgaaaaaaatcagcgcaacacctgaaataacacgcgtgagtagctggttggatttcactaatctgttcaatgtgggttgtattaggtcggtagcaatcaaatcaactgagtctactccacccccttccctttctgttcctgagaaaagcgaaggtaatgcagataacaaacacaataatgtagaagacaaaagcaatgcaaaaatcaaacacattgcagaaaccaaaaacaatgcagaaactaaagctaatgcagaagtccaggactatgcagcagttgtccctgtaacaaagcctactcacatagacggtaaaagcacccattacattcatcaggtgattaccgtaacctacacgacaagcagtgatgccttaaagctttatttccaaaatggtggcggaccttgttatatcctgccaatttctaattcagaagataccaacacgctggcattaatccctgagttaattgagcaggctttagaaattaccttgatcgtctgccctgaacaggatcctgcttatcagagtgcaatatatggcaacctgacccctttattaaaggccggatattttcttatcgcggataatccgaataaagaaactgcacttagcgttagcctgcaatcacaaaccgcgacttattatccggcagtaaaagtctcacaacttattcaggtggaggagaataccgtcacggtttcaggctatcaggatgcaaaagttacccatctggcagagctcaaacagcaaaactcaggactctataagcaagttatcgaggcaataaaacaaaaaattgctgataacaaaaaactcattcccgccagtgcaatcatggctggtgtctattgtgctaccgatgctcgtcgtggcgtctggaaagcaccagcgaatgtggttctcagcgggattagtgatgtagcggatcgactcacggaagatgagcaaggcaccatgaatcaaaaaggtatcaatgctattcgctatttcaccaacaaagggtttgtcgtctggggcacacgtactctgcaagatgatgacaactggcgctacattccggttcgacgcttattcaatgcggcagaacgggatatcaagcaagccatgcgatttgccgtttttgaacccaacagtcagcccacctgggaacgggtccgctcagcgattgataactatctccatcaactctggcaacaaggggcgctggccggtaatagcccgcaggaagcctattttgtccagattggtcaaggtgtcaccatgtccgacattgacattaaacaaggcaaaatggtggttaaggttggaatggcggcggtccgtccggctgaatttattatcctgcaattttcgcaaaatgtagcacagtaatcgtactgaggcgcggttcgccgcgcctattctggcaaggaaatgagaatggaaataaaacagccgggcgtcaccattacggagaacctgatatcccagcaacaagatgaggcgtttatcggtgtaccggtttttatcggctatactcaaccgagtaaaaacaatcgtgctagtgacaaaaccgccgtcaagctccacagcctgaccgattttaccctgtcatttggtgaatcaggattaacatactattccgtgcgtcacttttttgacaacgggggtcaacaagcctatgtactgtcgttaggatcggataaaccacgaggcgattttcactcattgaccaccaccctacaacaagattgggttaaacaagcgatctcggcacagagtgctatcacgctgattgtggtccccgatattgtctatctgaatcagatggatgatcccgattcagaaatcgatcaatacgacaaaatccagttctggctacaattttggcaatcagtacttagcctctgccagtgccgacgcggcatcatgggattgctggatgcccccgatgatcccgctctggccgagaaatgtttaacgcagctctcttccagtgatcggcaatggggcgcggtatactggccaagattgaacagtgcttatcaggaacaaaatcagcctgttgttctttcgccgaccgccgcagtggctgccatcattcagcgtaacgataaccaaatggcggtctggcatgcccccgcgaatgtcgcgttagccaaggtgataagcccaatacgctctcacattgaagccgataccctgtttaaccagaatggcccttcgttgaatctggttcgcagcttccccggcaaagggatcaagatctggggatgccgcacgctggacaatacccccgattctccctggcgctatatccagacacgccgtctggtttcctatatcgaagcccatatgactcaactgggccgggcctttgtgtttgaaccgaataacgccatcacctggatgaagtttaaaggtcaggcttacaactggttacgtcagttatggctaaacggcggactgcgcggtacgcaggaagatcaggcatttgaggtgttactggggattgacgagtcgatgagcgaagcagatccacgggccgggaaaatgatcatgaagatcaggctggcactgttaattccggcggaatttattgagctgaatctgacatttgatacccgcaccgggatcagccattaaacagggacaaaatatgaacaatttatacaccccgtcggtatcacaccgttttatcgccagttttctgtttaacaatatccccagcccactcgacattgcctttcaacggatatctggcctcagccgtgagttgcaaactagccaacatagtcagggtggggaaaacgccagaaatacctggctggccgagaagatccagcatggcagtctggtactggagcgcggcgttatgaccgttacgccactcactctgacgtttgaccgcgtcctgcgtggtgagaaagccgtgtatgccgatgtggttatcattctactgaatgaacattcaattcctgtggcaagctggacattaagtaacgcgctgccggttcgctggtccaccggcgaccttgacgccaatagcaatacggtgctggtgaacgctctggaattacgttatcaggatatgcgctggttaggagtaaaagcatgactgttgaaattaaagagctgattattcaggctaaagtgaccgattcagccagtcattcggtcactccacgaacactagcgcaggaagtgctggataacgccgacctgattgaaaaagtgaaacaagcagtattagatgccttgcgcgaaacaggaggtcattatgagcttaattgaacgcagcctgtccaaactcaccctcaccgctttcaaagatcgtgagggaaaaacctcggtaggcagtttacaggcaatgtataaccccgataccatccagctcgattatcaaacccgttatcagcaggatgaaagcgttaacagtgccaaccaaagcagccgctatgtgttatcccaaccggcgggcctgtcattagtcctgttatttgacgccaccatgcccggccataacaccccggtagaaacgcaattagcaacgctaaaagccttgtgtgccgtggatgccagtactcacgttccccactttcttaaaatcaaatggggcaaaatgcgttgggaaaacaaaggctattttgcctgtcgggccagtggtctcagcattcattacactctgtttgaccgggacgccacaccgctgcgggccagcgctaccctatctctggtggcagatgaaagctttgtgattcaagctaccgagcagcaattaaaatcgcccccggctactgcggttaacgtcacggatatgctctccctgccgttgatcgccttaggtgccggcgcttctttggcggggggtattgattatctctcgctggcttggcaaaacggcctggataatcttgatgactttacccccggacaaatgttgcaagcacaggggaaagcatgaagataccgacgataacgatcaaaatagacggcaaagtcctcaatcaatttacggttatcactctgaccgttaaccatcatattaatggcatcccctcggccaatatcaccttgggtatcgccggtgatgcccgccatatttttgatgccaaggcacaagctgaactggcaagttgccgccctaatcatcaacttagcgtgcagatcgaaaaagccgtggtgtttaaggggatcatcgttcggcaaacattggggcttaaaggtcaggacagcatcattactctgaccgccaaacatgcgttgcaaaaattaactcacaacttccactcgcaactgttcaacaaacagagtgatgaggcgattatcaagaagttgtttagccaagcgggtatccctgtcacgataaaaccagcccctcagcttaaaacggtgcatgaacaaatggtgcaattccgctgtaatgactggacgtttctaaaaaatcggctgctcgcgacccatacctggctgctgcccggcaacgatagcgtgacgctggtcaccccggaatccctgaatcggtcaaccgtgcatactctccaccagcgagccaaccctcaggatgcggtgttatttgaagcgaatctgcaatgggataaccaacgcaaccccaaaaccgtgaatgtacaatcttgggatatcgcccaacagaagctgtctccagcccatcaggtaaaaaacagcggccttggtcgcaatcaactcgccacagacaacctgacatcattgaccagccaaccatggcagtgggttttcagctatccgttggataatgaacaggccaaacagcttgctcaaggcatcctgaataaccgccgaagccacaacgtctccggtaattttgaggtcgaaggcgataaccgttatcaaacgggggatgtgctggcgttaaacggctttggtcaggggatggatggtcaggcgattatcaccggtgtcagtcagaccctcaatcaacggcaaggctggcgtacccggctaacgctggggctattaccggaaacagagcaagttgtaccgcaggcaaaagagctgcatatcgggatcgtggaaaaataccagcgagatagccaatcattgggccgtattccggtcaaaatcccggcgttaaacttaaccaacggcaccctttttgcccgcctaagtaaaccttacgccagtcatgaaagcggtttctgcttttatcctgaagcgggggatgaggtgattatcggcttctttgaaggtgatcctcgcttcccggtgatattaggctcgatgcacaatcctaaaaacaaagcgccgttagaaccgagtgaaaaaaacccggtgaaaaccttagtgattaaacagggagaaaatcagcaagcattactctttaatcataaagataaaaccctcgcattgaatagcggaaaacataccttatctctgcaacaggataaagatatcacgcttaattccgctaagaatcttattacccatgctcaggaaattaaaatagaggcgcaaaaatctctgtccgccgccggtaaatctggcgtagatattaaaggtgcgaagattaatctaacccaataataaggtaataagatgacaaataaagcactagccaataaagtattaaccaacaaagtattagccgatatttatggtcggggttgggcctttccgctgcaattttctattaaagatagtacgtataaagatagcgctcatcctgaaatacccacgggcgtcaccatggcggaaggggccgaaaatgtccgccaaaatatgaaaattctttttctcaccgaacccggcgaacgaattatgcgagagaattatggttgcggcctgaatgattatctgtttgccaatatccgtgacgaaatgatggcagaaattcagactcgaattgaagaacgggtattgcgttatgaaccccgcgccgatattagcgagatccaggtcaaccagagaaccgacctgcccaataccttgcatattcaggtcacctacacgctgagaggcagcgaaatcagccagcaaattgaaggtgcccttgaagtgaatgaaggccgggtacaggtgagtttatgagcaaacaactggtggtggatggcgacactttgctgttcgagccgttatttggcaaccgacaagtcaccattctggggccggcaaccatccgcggtagcggacatacccaaattcagggcaaaaagattgtcatggtcggtgatgaaaaaaaggtgcaacttcaagcgcaatatatcactccaagccacccagttcccggcatggggatggtcaccattgctcaattggatgccagccagcaggtaaacttctgccgtagtccagtcacggtaattgttgtcgggcaacaatttatcgcccgatttaccccgacacagccagccaataatccatcgagcggcccggatgtgaccgcccccagtatgggcaaaggccggtttattgccagccaatatgcagtcactgccggataaataatctttttaactttattttaaataacaatattttcaaataatcacgatccctgaaaacctatcgggaataattatataacaggtggtaaaaatatgggacaagccgagttagaaaataaactctctgctattgtgccggatactgtatttaaacttgatgaaagaagtacgctagatattttaaactggcttaaagcttacgctaaagaaattcctttcgatcaagagaaaaaacagttctgggacagtttctactttattcaagagaataatcctcaacaactagcggacatttaccaaaatgtgaataaagccgatggtcgattacccgcacatcaagcttttgttttggcttttttaacgttattagaaacaactaatcgattattaaatacctttccggcccggcaccgtgatctttattaccgggaattattggggctgaaacccaaaaaagcgcaagcagataaagttgcgataggaattaccctcaatcccgacagcacagaatcgctgatagctcaaagcacgctatttgatgcggggcaagacagcgccggcaatccattacactatgcgtcagatacagatttattggcgaaccaaggggaattaaccgacttacgttggtatcggaaaaaaaataatggttggttatcggcaatcgcattaaatcttgcagataacatggcattgcctgaaaacggtattcgactttttagcccaacggccaatgatgttccggttctatccggttacctgatcacttctcctttatttgccatgtcagcaggagagcgcacgattaaagccacattagcccgcgaatggacaggtaatgctgagaacatcaccgctaaaatgagttcgggcgatcactggctttctttatctgcaaaaaaaggacagagcaacaatacccattatcttacactttgtttatcagctaataatgaccctatcagttcccctgatggcttggataatatggcgtttgatataccggtgttaaagctaggcaccactcaaggcccgactctacccaagattaccgacattgaagtcagcattaacggtaaccgcagtgtgcactatgcctctgatggcggtattgaacagacggataccaccagcttcccgtttggtcaatcaccgtcgttaggctccggttttaatctgattgccccggaatggtatggctctgaaaacgcaacattgacgattacgcctcaatgggtgggattacctcaacaaaacttttcaaaatggtatggaggatatgaaactaagcccgacaatagtgcctttaaagtacagggttacttaatcacacctcaaaagagagaaaagcttaatgaggtgcaagcattattcaatggaaaagaggcaccacaaggacaaaacctgacatttaccttaccggcaatgcattatccccttgcagacagcccatcgcccaacgaatggccggcatccgtgcgcatagaactggccggacaagattttatgcacgcccaatattggcaaaatcccacgggtaaaaatgtcccctatacgccacaaatcagtgcattgcagattcaattcagcgctaaagctaagcaattttccatctatccactgacgccttttggccaaggcgaggcaacagcagaaacacctgcattaacccatgaagccttctatttaggctttacgggcgtatcaccgggacaaactctatctctctattggcaattagcaggcattaaatcgctcgcgttatcttggttttatctcaacaacagcaatagctggagcaaattagacaaattagttgacgaccaaacccataacctgtttgaccggggtatctggcgcactttattgccacaggatgcggcaaatcaggcggccttgatgccgacaggacgctactggctgaaagctgagataacgcaacaaaccgatccgcaagattacccacgcattaacggtctactgtataacgctaccaccgcgacgttgatcaacgcagaagccgttgagcagacgcactttatcaacggattagccgccgacagcattaaacagccggtaaacacggttgttgccgtcagcaacatcacccaaccttgggcctcttgggatggtcatccgcaagaaaccgagcaagccttcctgacgcggctcccgcctcggttatctcaccgtaatcgcgcgctgagttggggcaacattgtcaccttattaaaagagcaatttgtcagcctgtttgatgtcaaatacccgtctgccagtgaattaaccaaaatcccggcaccggaaaaacagcaactgattgtgatccctgacagccgttacaaagataacgacgatgcgctgcgcccaaaattaaatcccgctcggctggcagagatggtcgaatggatcaaacaactcagcagcccttgggcaacccttgagatcagcaatcccacttacattgacgttaatgtgaactatcaagtgacctttatcgcaggtgttaaccccgactacggatatcatcagctacaacagcaattaagccgaaaatatatgccgtggggcgaaaataccgctatcggcgtgacaaccggtaatcacattgattactaccccttgttagccacgatccagcaatcttctctggtggaacgcgtcaccgatttaagcctaaccattgctaaccgaaccaccggtgccgtgggtaaaagtatcgaaaccgccgataatgaagtgctgattttagtctggccagaacagcgtcccttaaaccaaggagttaacccatgagtcatcaggatgccctgtttcccatcgtcaaagacgatattaccttcgatgccttactcgctcaggccaaaaccgtgattgagcagcaatccggccaatgctggagcaataccagtgaaaatgatcccggcatcaccttattggaagcctgctgttatggtgcctccgatctggcctaccgccacacattaccactgagagaccttctaacgccaaaaccagaagaccaaacatccggcgacggtatttttcctcaggagttcggcccacaacaaacactgacctgtggcccgatcaccgcagaagattatcgccgggctttattggatttacatagcagcgacacaattaataacacccgcgaaggttattttttctttaatgatgtccaattaattcgtgaacctgaaaatcaacgttatcagtattggtataacaaacagaaacgtgaatacagctttaaaaactccggctcagatagccaattagcactaagaggaaattattggctctatttacttcctagccgggaaactgaaactaatacaacactggctgaggagagtctgaaaactttcctaaaagataaccgtaatctgggggaatccgtcagcaaaattatctggctgcaacctgccgatctccccttgcagattgatattgaacttgaagataacgtcattgatcttcctgatatcttcgctcaggtttacatgacggcggaacagatggtactgcccaagcccgaacgttataccactcaggccatgaaagatcagggttaccatcatgaagagatatttgccggcccttatttacatcacggttggataccgaccttacctcaaaccaaagattacaccggcgatacggtattaaatctcagccatctggttaatcgattattagcgattaaaggtattcagagtgtaacccggctagcattagctcatcacgacacaactattacgccattgtcgaacgataattggtcttgggaaatcgctcaaaaatattaccccagattatgggggagtgatccactggcattaattacctcagcaaacagcccgcttaccattaccgccaaagggggcgttaaaattggtgtttctaaacaagatatcgaagaaaagcttattgcagaaccactgattgatatacagccggaattactgcattggggtaaatatcgtaaagttctggattactatccggtaagcaataaattacccacttgctatggattgcagacctatgccagcaaccaacagcaaatacagttacaccaatttatgctcccttttgaacaaatgttggctaacggctgtgccgaactcgcccttttaccgaaattactggcctttaaacaacggggagaaacagtacacggtgtgcaatggccttttaaaacgggtacagtcagccatcgtgttcaccaacaagtcattcctgatttaaccgcaaaactaagccgcgattcacaaatctatattgataaccatattcagaagccaaactatataaaagaggcgacaattctgaattatctgttgggctattttggcgctcaacttgccgccagaccacttacatcgaactcactactgggtttcaaagactttctgtctactcagcaaggctatctggctcaacaacccgaactaacctatcaacgtaataatattcggattgataaagtgtcggcactgcaaaaacggattgccgcccgcttaggtttgggtggagaatgtttcagtaaaacacctaatctggatgacctgcctttttatttaattgaacatcgtcaacttttgccgataaaacccgacacgaaattcgacgataaacaaaaacctgacgatctaaaggtaattgaagagaattcaggctctaaaaatcatcaactcatcatcacacaacaaggtattgcaggtcggttattacaaggtcaggtgattaatctgattattattgaagatgatagagagtttatattacggagccaaatgatcaccgaagtgacaggagataccttttcccttagtacccgtaacagcagcgatttggaacgcaatctggacagaataagacagaaatttaatgatggtaatctgcgctggcaaaatagcccagtgtggctggaagatatggattatcaattggtttatgccgatgagacatataaaaatgctaccgacgatcaacgttggattacttccagtgctcaaagccccttccctgctatgattgaagaaaatgacgaaatcaccctgaaatatgtgattactccctctgggccagatctaaaaatatcacctcgtacagttatccctgaaccgagaaccgaatatgaactcaaagcacgagtcgttaaatttgatcgtattcaaggcaagatattaattaaatgcaaccaagactcaccgaataaaaactttccaaaagaggccgaagcatggctttatcgctggtatttctccagcgaaaaatatgctttggccgatcgcttttcatttgtggttagcgtagtagtgaatcgtcggttaattcagaatggcaaagttgatccttacaaactagaatcttgggtgaaaacagaaatattagctgaattccccgcgcatatttcaatgattatccattggttatcaccggaacattttaaagattttgccagcacctataaacgctggcaaaacaatgacgcccctttaggagacgaagcataccatattttagaaaccttaaccttgggacgcctaccttctaatgcaaccggtattggtaatatgcgaattgccactaaacagcaacgtaccgaggtcattggtggatctggcaatcaatggaatgcaacagtcataacaagtaatcaattattatatgtgcctaagccgtaggcataactaaactcaatgcaattattaataaagacagtagcaaaaatataaactaatttatccaatataaaaataaattaatatagcactacaaaagacttattttaatattaaatatcttctcctgtttaattatacaggaatacctataagatatttaaatcataataatttaacaccatataatataggatgataaaaatggaaaaaaaatctaatctatctaatgcaaaatccaatatggaaaatatcaaatcaaatggcccatcagcagatgatttaaaaaagcgctttaaagaaggcagtattccattacaaaccgattatgccgacctgattaatattgctgatatggggcgctgggctgttggtaaagctcccggtcaaacagataatccaaattcagcgctgaaactggataatggcggtgcattagcggtaaaaattaacgacaacggtggtttaaaggcagatgagaatggattaagtgtaaaaatcaagaataaaagcctgtcagttgataataacggattagcagtcaatgccggcagaggattgagaattaacaacgataagcttgaagtcaataatcatcacggtattgaaatagttaatgaaggggtaaaagttaaagctggtgaaggtattaaagtagacagtaacggtgtcagtttaaaaatgggaaaacctatcagtaatgccttttctccattaatattagaacccaaaaatgatgttttatctgtaaagataggcaatggcctgtttgatagagacaatggaatatcagttaacccaggtaatggcattgatgcaggttacgattatgtggctgtcaaggctagtaatggtattactgttgataatagtggtgtttcagttaaagcaggcaatggtattacagttaattcaaatggtgtaagtgttaatattcaacaaattgcatcagcactcgcggacttaattattccttcaggaacaattgtaccattttatagtaatggcagtttacctaatggttggctatggtgcgatgggaataatggcacacctaatctaaacaagggtataccgaatgagatcaccttagttgcaggttggataaaaaaaataaatagtgcttattttatcttaaataatatatacccgtaatcattgaagatgcttgattttatccgaaatggagatcattatcctcgctatgaaaatattcattaccgatgaacaaaaagccgaacttgaacatctccatcacacctgccgtgataagagggagtgtgatcgcatcaaagcggtcctgctggcctctgaaggctggagttcagtgatgatcgctcaggccctgcgtcttcatgaaatgaccgttaaccgtcatatcagcgattaccttaatcaaggtaaacttaaatctgataatggggggtctgatagtttgctttctcaagaacaaactgattttttaatcaatcacttatctcaacatcttttccatcacacccatgaaatcgtggcctatgttgctcagctctggaatattacctttagcattcccggcatgaataaatggctacaccgtcagggtttttcttataaaaaaccttgtggcgtccctcataaattcgacgcagaaaaacagcgacaatttattgaatattatgagaatcttaaagtcacagcgaaagacgaacccatcctttttcttgatgctgttcacccgactcaaggcaccaaactcggttatggctggatgcgaaaaggcgagaaaaaaacagtaaaaacaacaggaagccggactcgcctgaatatattgggcgcgctcaacctgaatgccattggtcgtacggtgttccaggaatatcaaaccatcaatgactacaacatttgctgttttttcaatgaaataagaaagtcttatcctgactatcatcaaaaaattcatcttattgtggatggggcgggttacaacaaagctcatcttgttaaggagtgggcttatgttagcaatattgagttacattaccttcctccctatagcccaaatttaaacccaatagagcgattatggaaggtcatgaatgaacaggttcgaaataaccgttattttgcggataaacatgaatttcgagacaacgtcttcaaatttttcaccacaacgctaccggatatagcggactcgctgatgtctagaattaacgaccattttcaggtgctaaaaactgcatcttgaagtttcttgggtatatatggtgaaaatagtgaaaacaatacaaaagttcaagacggaaatttaagaataagtgcattttatacaaaatatatcatgaaaaaatagactcgttaatcagaatagtattatacatctatttatattaaccacatttattagttaaaaatgagatattaatatgtcttgggcaccaaatctgttaaaccggattaccattactatttcaactaataatcaacagctagctaaaaaagtattgcatggctccctgcttaatcaagacaatatacataaattactcagctcatactttgatgaatataacattcatcagcatatctctttagagacattaacccttaatcttggtgaaataagttcctatgaatttaactcattattccctgttcgtctcaaggctgagctgaataaagtacttaaccaatatcagataaacaaccatcaggaagaaattctactgaatgaaccaatatctaataaatttaccgataattcttccgcattctgcgataattatttaattgatgcggagagttttattcattttttatatcaacaagattcccaattaaatacactggagacaataaccaatcataaagagattaatattaataaacttattcaccaattagcacaaatagagaacaaatggatattgctattagcaaaaagctgtctatctgaacatggtctacaacgacttttggctatcaaacaacccgctttattcattgccattaatcgcagattatccgaaaaagtaaacaaaccacaacatcaggaggagcttgtctcctccacacaactgatactcaacgcactggaatatctacagcggcataatattcaggaaatacctaaacccaatacgaaaatcatttcacgtattatcactgaacttaataacggcgtacttaataccgatcctattattaagctatttcgccaagctatgaaccaaaacacgccattaaatagttggctgaaacaactctggcaaactgtttctgtttcacggctttgccaaaaacatctgtcggttaaggagtaccaatatctattggcatgctttatgccaaaccatatagataaaaatacacccggcaaaaaatcagctacgaataacattaatttttcagatgttcggcaacatcaacctctggtaaatcagaaggttattaccgaagatcagaaaatactatcaacatcaaactctccatgccaagtcaataatgccggcatattaatgctctggccgatgctacccgcattgtttaatcaacttggcctacttgaggggaaaaagtttatccatcgtcaagcccaataccatgctgttaatttccttgactatctaatttggggaaccgacgaaacaccggcagaacgtaaaagactcaataacattctgtgcggacttatgatcaatgaaaataccgaatcaatctctgttgaaccagaaaaacaattaaccaccacgcaatggctggataccattattactcaacttcccggctggaaaaaattaagctgcaatgacgtccgccaattgttcttacaacgaccgggtgaattattggtaaacgagcaagaaatcaaaatcaccatccagcaacagccatttgatgcattgttggctgactggccgtggccattaaatatcgccaaacttccctggttggatcgctctttattaatcgactggaaaaatatttaacaggtttatatgaacgctttacttaaaaacaaccatgatatggcgacagaatttcactggatttatccccatctggaacgtattgatctacgattacaacattactattaccaacatggagaaaaatacgattatttaccggagagttttctacttaccgaagatgaattaaacccgcggctggcaaaaccacaaggcattcctcattgggtcaccaaacaagatgatattattaattcccctgaaatcgacgaaaaccccaatgcattatcacaattaattgaacgttttgaactgactgaatttgaacgagatgttttattattaggtttattaccccatttcgatagccgttatcatgcgttatttgcggctctgcacggtaacagtagaaaacagtggcctagctttgacttagccattgaattatttagccaacgccaaggtgatcggccattacgacaaaatagctttctaccgcaaacaccgttaatcagtcatcaactattacggcttaataaccacgaagaatctatttggttacaaactcaatttctaactcacagcgctgtctggcatttcttatcaggccaacgggttattttaccgccgctgacaacttgtgcttattggcactcttctgcctcacatcgttggtatccacaatccctttacccttcacttgaaaagatattattaaataaaactgacgaaatacgcccgctggtaatactcagaggaaaacaagatagcgccagagaattagcggtaagcaatatgatggctcttcatgatatcagtacattaactctagacttagctcaactgccggaagaaaataactctaacttgctaatagatgcagtccgggaagcacgattacatgatgcctgtttattaattcgcaatttttctttgctcaaagatgaaaagaaaatattacacagtgaattttccacgttattgaaccaagcaaaattacgcgtggtttgtctggcagaaccacaagattcattagtgtggattaaacacttaccaatagtgcaaattaatatgccagccctgactctggcagataaaaaagccatgctggaagccaatttatcggataatatcgcccagaaaataaatatcactcaattatgccaacgtttttcatttaccgcagaaacattaccgcaaattcttcaagaagcaaatcaataccaaatactccgacaaccggaaggtcaattggaagaaaccgatctgcgtaaagcattaagtttccgtgctcaacagaatttcggtaaattagcgcaacgaataacccccaaacgcagccttaatgatttagttatttcagacgtattaacgcaacaattaaaagaaattattgccgccattcattaccgtgaccaaattctggctaccggctttcaggaaaaaatcggttatggtaccggcattagtgcgctattttatggcgaatccggtaccggcaaaaccatggccgccgaagtgattgccgggcatcttggcgttgatctgattaaagtggatctctctaccgtggtgaataaatatattggcgaaacggaaaaaaatatctcccgtattttcgatctggccgaagcagattccggggtactgtttttcgatgaagcggatgccttatttggcaagcgtagtgaaaccaaagatgctcaagaccgacatgccaatattgaagtttcttacttattacaacgattggaaaattatccgggattagtgattttagccaccaataatcgtagccatttagacagcgcctttaatcgccgttttacctttattacccgttttgcttatcccgacgaaatgttacgtaaaaaaatgtggcaagtcatttggccggaacagattaaattatccgataccattgattttacccatctggctaaacgcgctgatttaaccggggctaatatcagaaatattgcgctattagcctcaatgttagcgaaaaatgaccactgtgaccaaatcgaaaataaacatatcaatcgagccattacactcgaattaaataaaactggccgattggttttctaaacatttaacaaaattggaataaacatgacaatcctaattgcttctgacaatgcgattattgaagtaaataatgcattaaatactattttatcccagcatctgaatatcaatggcaataagattgatatccgttttgatctacccgaaattaactccattcaatcggaaccgacagtcagtgtatttctttatgacatcaatgaagatttacaattacgttctgccgaaccaagacgttataacccgatgaccagcacattattaccgggatgggtcaatatcaattgtcactatttaattacttattgggacgctaataaaccatcaagcgacagttcaagcccggatagccaacccaataatcaagctgcacaagtgatgactcgtgttctaaatgcattaattaacaaccgtcaattaaccgacattcccggtgcttatacccgaattattccccaacaggagaatttaaacagcttgggtaatttctggcaagctctcggtaatcgccctcgcctctctctaatgtattccattaccgtaccgatgaaactgcaaaatattaaagacaatattacacccattaaccaaatttccgcttctgtggagcagaaacccaacctaaataattcacaaatcaatcaagctctggtagataaattatgtgccgatttaggtggtacagaagatgctcgtcttgctttggctaaagtcaatctggtaactaaatttgtcacagacaataatgatagtaatgaaaataaaagcattattctggagatttctggcattacctattcaacttatttacctaaaataagaaatattatttcaatatgggtaaatagtcaaaaatccgttgttaaggtaaatgggatagatattaccatctcaaaagaggactctaaagaattaatagaaatataaaccatttcattaatagatttaatttccatattattttatcgaggaacacctcttaataataacttataggtgacaatattatgccaaaactaacagagcttttaagccgtttcgaaaatcccattcagaatcaaccaaatcatataagtaaaaaaaatcccatctctaattccaaagttttaaataatagtgaagaaaaaactgcccccctcgaattaaaacatgatgacagtaaaataaaatcacaggtatctataccaaatttagtgaaaaaaaatgaaaaaccagcagcatcgaatacgccaaacaattcacatgaaaaagtcaaagctgaagatattttcaaccgatttaaaagtaaatttgatccttatgacagagaattacctttcgacataatgaataaaataaccaataatgaaataaaattttcttctgaaaaatcgaaagatgattatttagctaaagtaaaagacaagaaattcacactgagacattatactgccggcactgggcaagaaaaacctacatttgatgagattagctcaaactttaatttggtaaataagggaataaaaacattaaatcgtactcaaggaagtaacaccaatgaagatgattggaaccgtttaggaaatacggcgtttactttctacttgctagcaatagatggagaagtatccaatagaaaattcttatctaatacaactcattttgcagaaattaatatagaagattcagaagaacttaaagaacttggcttagatcaagctgaattctttgcttctcctgatttacttcacgaaaaaaatctttcacaagcccctgcggtaaaaggaaaactgtctgatttgaaatcattattattaaaacgatctggcataagttcagttcaattagggcgtttagatgcgaaagcaattttaaaaagcatagacaatgaatttgggaatagtctcgaaatcaaaatcccagggaatgttaaagtgaacaaatggaataaaatttaaaagtaaatatataatcactaatattgatattacattaatattttcattatcagaggtaataatatgccgacaaataaatacagtaaaaataaaagcccagagaaaatcaaacaaattgcaggtcttaatccgagtgatctggaaaaaaactattccagtagatttattacaaaaaattaacaggtaataatatgccaaacagcaaatatagtgaaaaagttaaccactcagcaaatggagcggaaaaatgctcgatacattctaaccaatataatataaataactgtacattggggttaggattggatttaaacaaaaaattaagaacagggaatgaacgaaatatagaaggtgcacaaccttttattccattcccttcgaaacaaaaacaatatagtaccagccccatagcaatggctgatatattaaatgaaagcgcactgacttcacaaccaattattaccgatttaattaatccgcaaaagataaaaatgtcagacggcgtaaaaaatattttaaataacaaagaaggaggcggagatctagtgttcaaggcactacagattaaaccatcggatgaaactctgccattcaatgcattaaaaattgtcgatacctatcaagaagaaatgccgaataaagacatgtctatttcagcttattgggccccacaaggaggatatgttgatatcccggcccaacccgatatcagccgccatccacagtatgtatttaccccaaatttcagtggatgttcatttgtagtcgataaaatgaatgaagacactctccgggttcggcacgtacaaggtggtcaagaagatgttgaatataataaccaaaatattgatcacggaatgggtatgattacggcaatggaattccgcgattatggatatcacgaggctgatgacaaagttatagaaaatacctatggttttgcattcttaaaatttaaccaagagaaaaaacagtggcaacttcactatcagaaaatagccgcagcccctaatatcataaatataaaaactaaatctagttggttgccattcagtaagccttcaattgaagccgatacctttaccttcaaaaatatgaaagtccctggatatagtaggaagaatatcaataacaattaatatatacccaatagatttcaagttgcagtgcggcggcaagagaacgcatccccgggagcataggtaactatgtgaccggggtgagcgagtgcagccaacaaagaagcaacttgaaagatgaagggtatagataactatgtgaccggggtgagtgagtgcagccaacaaagaggcaacttgaaagatgacggatatatcaatagatttctgattctatttcactattgcaatactcaaaatacaacacggtcattcccatagattaaatacgtcattaaataatcaaaataatccacccctaccaaataaacattttaatttatttttatgataatcattagtgtgattaccctttcactttgctattaatttatcggtaaaatcataaatagagaaatcaaaccatcctatttaccccactcaataaaaaaataaccccaatcaattaccttgactttatcatccgcaaaacaaaaaaacctaaaaaaataaaatacaaatagttaccaacaaaatattttatagatgtgaaatatcatttaacattaaaattacatttcgtcatttattcttccgcgatagaaagcagtaaaagattgttgataaataaaatcattacaatctgctatatcaattaaaaaccaccattattattaattgataatccgtataaaaattcattatctataatcaattcgttttacggaaaacaatttagataatcgtaaaataaactatttaatataaacaataacctctataaatcaggttgttgcggtagctatacccaattgttaagtaataagagaagcaaaataacagacatttttattatatttcacatgtataccctatggatttcaagagcgagtgcagccaacaaagaggcaacttgaaagatgacgggtataaacaataaaggaaaaaaccatgactataactccagaacaaattgctgttgattatcctatccctgcttatcgatttgttgtctcggttggtgacgagaaaatcccttttaacaatgtttccgggcttgatgttcactatgatgttatcgaatataaagatggcaccggtaattactataaaatgccgggtcaacgtcaatcgatcaatattaccctgcgtaaaggggtcttccctggcgacactaaactgtttgactggattaattctattcaacttaatcaggttgagaaaaaggatattgccattagcctgaccaacgaaaccggctctcaaattctaatgacctggaatgtggcaaacgcctttccaacatcattcacctccccctcttttgatgccgccagcaatgatatcgctattcaagaaatagcactggtcgcggatcgagtcaccattcaagcaccttaataggtccacaataacgagctatctcgatgtttatattgcagaagataattatctgacggtattaattaccaatatgccaacccatgatgaccaacattatcatggttcatccatccaactaaattcatcattccacagtttacgtagaatatcgcatcataactcggagacaataatgccaataaccccaacttatcccggcgtttatattgaagaggacgcctcaccgtccctctccattcgctcgggtgcaacggcagtgcctgtttttgccgtcgcaaataataattcattaataccagacaattcctatattcgtattagtaactggttagaatatttaacactaaaaggtaagcaatttgatcccactaatacacttgatatcgcactacgcgcctattttattaatggcggtggatatgcttatctcgtcaaaaccacaaatctagaaagtcagatcccaaagcttgacgatgtgacactactgatcgccgccggagaagatattacgaccgctgtaggaacactttgccaattaggcaaaggattattcgctatttttgacggcccaacaacccaaatagcctcaacacaagcaccagatgatgtacttaaaccttatccagcaactcaatatggcgcagtttactatccctggctgactgctgaatggggagaaaataaagcctccattgatattccaccaagtgccgtcatggccggtatttatgccaatgtcgataacagccgaggcgtctggcaggcccccgcgaatgtccctgttcagggcggattacaacctaaatatccgatgaccgacgacctgcaagggagatataaccagggtaaggcactgaatatgatccgtacctttcctaagagcgggacgctggtctggggagccagaacccttgaggacagcgataactggcgttatatcccggttcgccgcctgtttaacagtgcagaacgagacattaaaaacgccatgagtttcgcggtatttgagcctaatagccaacccacttgggaagcggtgcgccgggcgattgataactatctccatgccctctggcaacaaggcggattgatgggtaacaaagctgaacaggcttattttgtgcaaatcggtaaagacgtcaccatgactgatgacgatatcaagcaaggcaaaatgatcgtcaaaatcggcatggcggcagtgcgtccggccgaatttattatcttgcagttcacccagaataccgctcaataattggaggcatcatgccaacaacaccgacctatcccggcgtttatattgaagaagatgcatcattatcgctctctatcagccacgggaacaccgcaatacctgtttttattggccgcttccagcctaaaaaagccagcgcaactctaaaagcgatacgtgtgagtagctggctggattttaccaatctgtttaatgtcggttgtattacgtcaatcgccatcacatcgactaaaccaacgccaacgccaccgcctcccccttctccttccgggaaagttgcaggcgatacagccactgccgatattgctcttgacgccgacgatacaaacacagattacacttacgctataaatacagttacctctacaaccagcagtgatgcgctaaaactttatttccaaaatggcggcggaccttgttatatcctgtccattgccgattcgggaaatagtgaaactacggcattactccctgaattaattgaacaagctttggagatcaccctaatcgtctgccctgaacaggattcttcttaccagctcgcgatatacaacagcctgccccccgcattattgaatgccggctatttcctgatcgctgacagccagggtaaaacaactaaacctacagttaatgtgccatcacaaactgcgacttattatcctgcggttaaaatctcacaacttatgcaaacggaagatagcctgatcgcagtttcaggttatgaagatgcagcatcaaacgaagtcaaaaatctggcacaactcaaacagaaaaactcaactgtctaccaacaagctgtccaagcaatacagggcaaaatgaaatccagcagcaacactattcccgccagtgctgtcatggcgggggtctactgcgccacggatgccagccgtggtgtctggaaagccccggcgaatgtcgtgctaagcggaattagtgatgtcactgaacgacttaatgacgatgaacaaggtgccatgaacctgttaggtattaatgctattcgctatttcaacgggcgtggctttgtcgtgtggggcgctcgtacgctgcaagatgatgacaactggcgctatattccggttcgacgtctctttaacagcgcagagcgggatattaagcaagctatgcgcaccgccgtttttgaacccaatagccagcctacttgggaacgggtgaagtcagccattgacaactatctctattccttatggcagcaaggggcattagcgggaaataaaccgcaggaagcctattttgtccagattggtaaaggcatcaccatgtccgacgacgacattaaacaagggaaaatgattgtcaaagtgggcatggccgcagtacgtccggctgaatttattatccttcagttttcacaaaatgtagcacagtaaccgtgctgagacgcggttgaacgccgcgtctattaagtcttacaaggagacgataatggagataaaacagccgggtgtcaccgtcaccgaaagcctgatatccccagaaccggatgatgtattcatcggtataccggtttttatcggttataccccctcgccggtcgataaaatcgctatcaagctcaacagtctggccgactttgcccggtcatttcctgaatcaggattaatgtactattccgtgcgccacttttttgaaaatggcggccagcaagcctatgtgctgtcactgggtacggagcaacaattaagcgatttttcgtcattgatcaccgcactgcaacaaacgtggattacccaagcgatttccgcggagaacgacattacgctgattatcaccccggatgctatccgatttaatcagacagaggtttcctatatccaacgtgatctctggttacaattttggcaatcagtgctcaatctttgcaaaagtcggcgcggcattatggggttattggatgccccggacaatcccacattagccgcagagtgtttaaaacagtttgcttccgcagatcaacaatggggtgccgtatactggccgcggctaaaaagcgcctatcaggaccaagcgcaaaaccctattgtgctttcacctactgccgcggtcgccgccgttatccaaaataacgataaccaacaaggcgtctggaccgcccctgccaacgttgcgttagccaaagtgatcagcccggtacactcttatattgaagcaaatgccctgtttaacccgagtggcacctcgctgaatctggttcgcagttttcctggcaaaggcataaaaatctggggatgccgaacgttagaaaatacccccggttccccctggcgctatatccaaatccgccgtctggtttcctatatcgaagctcatatgactcaactcggccgggccttcatctttgaacccaataacgctatcacctggatgaagcttaaaggccaagcctacaactggctgcgtcagttatggttaaacggcgggctacggggtactcaggaagatcaggcgtttgaattgctactgggtgtgggtgaatcaatgagtgaaaccgatatccaggccggaaaaatgatcatgaaaatcagcctcgccgtgttaattccagcggaatttattgaactgagcctgacatttgatacccgtaccggcaccacccgctaagttaaacagaaacaaaagttaaacagaggcaacatatgagcaacctctataccccgtcagtgtcacaccgttttatcgccagttttctttttaacaacattcccagtccattcgatatcgcctttcaacggatatcgggcctcagccgtgagttgcagaccacccaacacagccagggcggggaaaatgccagaaatacctggctggccgagaagatccagcatggcagcctgttgctagagcgtggcgtgatgacggtgactccgctcacgctagtgttcgatcgcgtcctgagaggcgaaaaagcggtctatgccgatgtcgtgattatgttactgaatgaacattcattacccacggcaagttggacattaagcaacgcgctaccggtgcgctggtccaccagcgactttgacgccaatagcaataccgtcttggtgaactcgctggaattacgttatcaagatatgcgctggttaggagtaaaagtatgaccgtcgaaattaaagaactgattattcaggccaaagtcactgattccacgagtaattcttcctcaccaccaaccttagcccaagagacgctggataatgcccgcctgattgaaatagtgaaacgggaagtgttagaagcgttgcgtgaagcaggagtccattatgagcctaattgaacggagtctatccaaactcaccctgaccgcctttaaagaccgagaagggaaaatttccgtaggcagtttacaggcgatgtataaccctgatgggattcagctcgattatcaaacccgctatcaacaggatgaaagcgttaataatgccagccaaagcagccgctacatgctatcgcaacccgccggtttgacattagttctgttgtttgatgcgactatgccgggcaacaacatcccggtagaaacacaattggcaaccctgaaaaccctgtgtgcggtggacgccagcaccagtgtgccccacttccttaaaatcaaatggggcaaaatgcgttgggaaaacaaaggctatttcgcttgccgagccactggtctcaccatccattacaccctgtttgaccgggacgccaccccgctgcgagccagcgccactttatcgctgatcgcggacgaaagcttggttattcaagccacggaacagcagttacaatcaccgccggttatcgcagtcaacgtgaccgatatgctctctctgccgttgattgcattaggcgtcagtgctgctctagttggtggtattgattatctcgccctcgccagacaaaacgatttggacaatctggatgatttcactcccgggcaaacgctacaggcacagggggacgcatgaagataccggcagtagacattaaaatagcgggaaaaaccctcagccagttttctgtgataagtttgaccgtcaaccatcaaatcaacggtattccctcagccaagatcactctcggcatagccggtgacgccaacgcaattttcgccccccaagctcaggctgaactgacaagctgtcggcccaaccaagaactgatcgtgcaactgcaagaaaccgtgttattcaaggggatcattgttcgacaagcacttaagttcaaaggtcaggacagtctggttaccctaacggcaaaacattcactgcaaaaactcactgacggtttccattcacagctattcagccaacagaatgatgaagacattatcagaaagctattcgatcaggcaaagataactgtcacgataaaacaggtgcctcagcttaaaattaaacatgagcaaatggtgcagtttcgctgtaatgactggaaattcttaaaaagccgactggccgccgccaatatctggctgttgcccggtaatgaggccgtcacattagcgacgccggaatcacttaatcagtcaaccgtgcatacaattaaacaacgtgccggcgatcaagacattgtgctgtttgaagcggatctgcaatttgataatcgacacagccccaaaacggtgagcgtacaagcctgggatatcacacaacaagaactgtctcaggccaatcaggcagaaaacagcggggttggcagcggtcaactcgcgtcagacagtttagcgacgttgaccgatcaggcatggcagtgggttttcagctctccccaagataatgaacaagccaaataccttgctcagggcatcctgaataacctgcgaagtgataacgtttccggcaatttcgaagttgcaggggatagccgttatcagccgggcgatctgcttgctctaaatggctttggtcaagggatggatggtcaaggcattatcaccggcgtcagtcagaccatcaatcaacggcaaggctggcgcacccggctaactttgggtttgttgctggaaacagaaccggtggtcccgcaggttaaagagctgcatgtggggattgtggaaaaataccaacaggacaagcagtcactggaccgaattccggtcaggataccggcgttagatttaaccaacagcgtgctttttgcccgactgggtaaaccttatgccagtcatgaaagcgggttctgtttctatcctgaaccgggggatgaggtgattatcggtttctttgaatgcgatccgcgctttccggtgatattaggtgctatgcacaacccgaaaaataaaacaccaatcgaacccagtgaaaaaaatccaataaaaactctggtcattaaacaaggggataataaacaagcattagtgctcaatcatcaagataaaatcgccgccattaatagcggagaacattcgttatcattgcaacaggataaagatattacgctaaagtcggcgaagaatattatcaccacaggtcagaaaattaatatacaggctaaggaatccctatcagccactggagaatccagcgtcgatattaaaggtaaggaaattaacctaacacaataataaggcaaccaaatgacaaataaaatattagccgatatttatggtcggggctggacatttccgccgcaattttttgtcaaagataattctcatcccaaaatacaaaccggcgtaacaatggcagaaggtgcagaaaatgttcgccaaagcatgaaaattctttttctcaccgagccaggcgaacggattatgcgtgaagattatgggtgcggtctaaatgattatctatttgctaatatcaatgatgaattgatagctgaaattaaaacccggattgaagagcgcgtactgcgctatgaaccgcgcgcggaaatcacggtgattcaggtcgatcagagaacagacttgctaaataccttacatgtccaggtgacttacgccctgagaggtagcgatatcaaccaacagcttgaaggcgtccttgaagtgaatgaaggccgggtacaggtgaacctatgagcaaacaactggtggtggatggcgacactctactatttgaacagtttttcggcaaccgacaggtgacaatcttggagccggcaactatccagggcagcgggcatgcacaaatccagaacaaaaaaattgccattgtgggcgatgaaaaagaggtaaagctccaagcgcagtatattactcccgattacccaacgcccggtacaggcatagtcaccattgcccagttagatgccagccaacaggcaaatttttgtcacagcccggccgcggtgattattgtcggtcagcaatttaccgcccgtttcactccgacacaaccggcgaataacccatcgagtggcccggatgtcaccacacctagtatgggaaaaggctattttattgccagtcaatatatcgtcaacgccggataaataacgcctttaaccttatttttaaataataacgatctcctgaaaaactatattcaaaccacaggtggtaataaatatgggacaagccgagttatataataagctctctgctatcgtgccggataatgcatttaaacttgatgaaagaagtgcactggatattttaaactggctcaaagagtacgccgcaattattcctttcgatcaagagaaaaaacagttctgggacagtttctactttacgcaggaaaatagcactaagcaattagcggatctttaccagaatgttaatcaagcgaatggtcttttaccggcacatcaagcttttgtattggcttttttaaaactgttagaaacacccaaggtattatttaataccctcccggcacgacaccgtaatctttattaccgggaattattaggactgaaccccaaaaacgctcaggcggatagcgttgctatcggcattaccctgaatacgaataacacggaatttctggtcgcacaaggcacgctatttgatgccgggcaagatagcgccggtaatccgttacactatgcatcaaacacggatttactggcgaatcagggagcattaaccgacttgcgttggtatcgaaaaaataacgatggttggcaatcggcaataccacttagcctctcagataacattaaattaccgaaaaacggcatccagctttttagcccaacagccaacgataccccggtgctatccggttatctgattacctcctctttgtttgctatgcccgcaggagaacgtcatattacattaacgctggaaaatgattggcagggtaaagctaaaaatatcaccgctaaaatcagcgccaaagatcactggttatcgttgtcggtaaatcttatcgacaaaaagaatatcaaactgggtttactctccactgatgatcctatcagcccgccagataaccttgacggcatgacattcgacgtaccggtattaaaattaggcaccattcaacaacccactttatccaaaattatcggtattaaaatcaatgttaacggcaaccgcagtgtgcgctatgcctctgatgacggaactgaacaaacagataaaaccagttttcccttcggccaattgccatcgttgggttccggttttaatctggtcgcccctgaatggtatggttctgaaaacgcgacgcttaccttgactccacaatgggttggcttgccgacaaagagttttaaagcgtggtataaagggtacacccctgaacccgataacagcgtatttaaagtacagggttatttagtcacacctcaggaaaaaaagaccattgatggcctccagtcattatttggcggaaccgatgcaccacaaggacaaagcctgacatttactttaccggcaatgaactaccctgttgcagacagtccatcccccaatgactggcccgcgtcagtacgcatagaattggcagggcaggattttatgcatgcgcaataccggcaagatccgaccggtaaaaatttaccctacactccgcaaatcagtgcattacaagttacatttaacgccacaatgaaagctgaacaatatgccgtgtatcctctcaccccttttggttggggaaatacgaacgctgaaacgccttcattcgctaatgacgcactctatttaggcttcaccaatgtgtcaccgggacaaaccttatccctatactggcaattggtcggtattcaagaacttgcgctattctggtcttatctgaatcaacaaaacacctggcaaccattaaaccaactggttcacgatcaaactcacaacctgtttgaccgggggacatggagtacgctgttgccacaggacgcatcaaatcaggcagccttgatgccgatagggcgatattggctgaaagcggagataattcagcagaccgcccctgagaattacccaaaaatgcaaggcatactgtataacgccaccactgccacactaatcaacgcagaaactgttgaaaatgatcattttatcaatggattggccgccgacagcattaaacagaccgtcagcgcgtccgacgccatcagtcatgtgacgcaaccctgggcatcctggaacggtcgtccgaaagaaacagaacccgcgtttctcgcgcgaattccacctcggttgtcccatcgtaaccgtgctttaagttgggataacattgtcacgctactgaaagagcatttcatcagcatatttgatgtcaaatatcccgacgccaataaattaactagaatcccggcaccgaaagaacaacaactgattgtgatccctaacagccgttacaaagataacgatgatgcgctgcgcccaatgctcaacgctgcccggctgacagaaatggccaaatggttaagccagttaagcagtccctggaccacgcttaaaattgacaatcccagctacactaacgtgctgatcagttatgaactggtgtttgctgcggggattaatcccgattttggtcatcatcagttacagcaagaactcagccggaaatatatgccgtgggcagaagacgctgcaattagtgtaaccaccagtaatcgccttgattactacccgttattagccacgattcaacagtcgtctctagttgaacgagtcaccagcttaacgttgaaaaaatccacccaaaccacagaagcagtgggtgacagtgtagaagctggtgataatgaagtgctgattttagtttggtcaaaaaagaatccatcaaatagaggagctgaccatgagtaatcaagacgccctgttttccatcgttaaagacaatattgcctttgatactttactcactcaagctaagacagtgattgagcaacaatccggccaactttggagcaatacaggtgaaagcgatcccggtataactttattagaagcctgttgttatggcgcgtctgatttggcctatcgcctttcgctgcctctcatcgatctccttacccctgaacagcaagaacagacaccgggcgacggcatttttccacaggaattcggcccacaacaaatgctgacctgcggcccaattactgcggaagattatcgccgggccttattggatttgcatagcagcgataatattaacaacaaaagtgaaggttattttttctttaacgatgtacagctagttcgtgaacctgagaatcaacgctatgaatactggtataacaaagaaaaacgtgaatacagtttcactcaaactccagacagtcaacagttgacactaagaggaaactactggctttatttactcccgaaccgggaaactcagactgacaatacactggctcaacaaaatctggccgctttcttaaaaaacaaccgtaacctgggggaatctgtcagtaaaattatctggctacaaccgacggatttcttattacagcttgatattgaactgaatgatgatgttaaagataccgctgacatctttgctaaagtctatatgacaacagaacagacggtattagcaaaaccattacgttataccacccaagccatgaaagaatcaggttacagtaatgaagaaatatttgccggaccctatttacatcacggctggatacctgaattgcccacggccaaagattacaccacggctacagaattaaaactcagtcacttagttaatcgcttattggctatcccagggatacaaaatattacccggttagcattagataaccacgataaaaacatttccccgctgtcaaatgacaattggtcttggacaatcgctcagggctattaccccagattatggggtaatgatccattaagcttaataacttcaccaacaagcccgctcattattactgccaaaggtggaataaaagtctccatttctaagcaagatatagaaaataagatcattaaagcgccattaattgaaacacagccagagttattaaactggggaaaacatcgtaagatcctgaactactatccggtcagcaataaattgccggcttgctatggattacaaacctacgctgagacccaacaacaaatccacttgcatcaatttatgctgccttttgaacaaatgctagctaatggctgcgctgaacttgccatcttgccgaaactgttagcctttaaacaacggggaaatgcggtatatggcgcacaatggccttttaaagacaatactgttggttataaagtccaccagcaaatcatgcctaatttaatcaaacagctaaataatgatgcccaaatcaataatgatgacggtatgcattggcaaaactatgcaaaagaattgttaatcctgaattatttgctggagtattttggtacccatcgcgcagccaggccacttaccatagactttctggattttctctctactcaacgtggttatttagcacagcaacccgaattaacctatcaacgtaataatatccgtattgatcaagtgtcagcactacaaaaacggattgccgcccgtattggtctgggaggagaatgtttcaaagaaaaacccaacttggctaatctacctttctatctaattgaacatcgtcagctattaccggtcaaacctgacaataaattcgatagtgaacagaagcccgataagctggaaataaaaagcgtacccaattctaaaaaccaacaattaatcattacccaaaatgggacaacgggccagctattgcatggtcaggtcattaacttgattattattgagggtgacagagaatttacactacgaggccaaatgattaccgatattacgggagataccttctcgcttgacactctcaatagcactgatttagagcgcaatctaaatcgagtagaacaagcatttgagcaaggtaatttacgctggcgcaatagcccagtatggatggaagatatggattatcaactggtttatgccagtgacacatatcaaactggcgcaagagatgaacgctggatcacctctagcacccaaagcccctttcccgccatgatcgatgtgaatgacgaaattacgctgaaatatattatttcacccgatgagtcatccacaaaaatattggctaatagtaattctcccaccgattatcagcttaaagcacgcgtagtccaattcgaccgaattaagggctggatattaattaaaaaaatatcagggcaacaatatgatttcccaaaatcagaagacgcatggcgttatcgttggtacttttccaatgaaaaatacgcattggctgaccgcttttcatttatagtcagtgtagtgattaatcgtcagcttattgagaatgataagatcgacccttataaactggaggcgtgggtaaaagtggagatcttagctgaattcccggcacatctttccatgattttccattggctatcaccggaacaattcaataattttgctgatacttataagcgttggcaaaacaatggcgcgcctctgggtgatgaagcctataatattttagaaaccttaacgttagggcgtttaccttcagcggcaaccggtacgggtaatatgcgaattgccaccgaacagcaaagaatagaggtaattggtgagtcaggtaccgaatggaatgaaaaggtaataaaagacaatcagttattatatgttccaaaaatctaacctaagattatatagcaccacaaaaatagtcatcaatttcattgttaaataaaatatcctctctgattgccattttgtgatatggcagtatttaaatgatatttgaaaaaaatcaatcaatattatatacaaggtaattaaaatggaaaaagaatataatctatccaatatagaaaacaccaatcctgaatcaataggaccttcagtagatgcattaaaaaatcgctttaaagaaggcagtatccccctacaaactgattattcagacctgattaatattgctgatatcggtcgccaggcagttggtaaagcacccaatcaaatcgataatccaaattcaggcttagtgctgaataatgatagtggattagcagtaaaggttaacattagcggcggtttacaagcggataaagatggtgtcagtgtaaaaatcaaggataaaagcctattagctgataataacggattatcagtaaattatggcaaagggttacaacttgataaagataatgacaataagcttacaatcaatagtcatgacggtattgaaatagttgccggaggtgtaaaagttaaagctgggaatggtatcacggttaattcaagcggcgtcagtattgatcctaacacagtactccctagaggaatgattgtaatgttttctggtaaaagtgttcctacaggctggacattatgtgatggtaataatggcacaccaaatttaattgaccgatttattttaggaggaaatttttctggtattgatggaaagagcagtactaccgtttcaggtcctaaagacagcaaatcatttaattttaactctaatgaagctacattaaatatcaatggtaaaacaagtgagagatcattatctattggacaaatacctaatcatagccatcttagtggaataaatattgatacaaatatcatggctcaatatggcgctactcagatcggcaaaacagatagagctgtagcctcatcaaagaataccagcgagagatatctctattattcatcaggaatactctcctctaatggaacgatcggccaaaacagtcctgaaacacacgatcatgatattaatttaacaaacacaggcaatcatttccacaagaaccaaataacaactccttattatatacttgctttcatcatgaaaacttgaaatttactaatcaattaaagttttaattatctattaatcacaaaggatatactaatatgacttcggagccaaatctgttaacccggattaccattactattgaagctaataattcacaggtggctaaaaaagtattacatggctccctgtttaatcaaaccaatataaaaaatttatttaatacattctttactcaatatcccattaatcaggatatctatttagaaacattaactctggatcttggtgaaataaatttacataatttcaattcactattccctgtaagacttaatattgcactaaataaagcattaaaccaatatcaaattaataatcaggagagaaaaatatccctaataaaatcacaatcacaatcacaatcacaatcacaatcacaagaaataaccaacaaaccttatttattatatgtcaataactcaattaatattgaagttttcattcattatttaaatcaaaaaaactccgcattcaatttagtagagattaaaaataatcataaaaatattgatatcaatattcaacaattaattaatcaattagctggaatagaagataaatggactttgtttttagcaaaaagctgtttatctgaaccaagtctgcaacggttattagcgctcaagcaacccgccttattaagcgctattaacaacagactatccgaaggagtaaacagatcacaatatttgggggagcctgtctcccccggacaactgatactcaatgcgttgcaatatatacagctaaataatacacaggagatacctaaactggatgcgaaagtgctatcacatatcacctctgaattagataacggtacacttaatgcaacatctattattacgttatttcgccagattattactgacaatattccattaaataattggttaaaacagatctggcaaactattactgttgcaaaatttagtaaaaaatatctatcagctaaagaatatcaatatttatctgagcattttatttcagaccatgcagataaagataaatctagcaagaaattagccgtaactcatgttgatattaaaaatgttcatagatataaatattcaataaatcaggagacaatatcagagaaccagaaaatattttcagcatcgaataacctacatattacaggaaataactctaacccattacagactaccaataaagcacgcgataaatcggttttattatccgaacaaactcttccctatcaggtaaataatgcggggatattggttttatggccgatgctacccgcattatttaatcaacttggcttacttgaagaacaacgatttattcatcatcaagcccaatttaatgcggttaatttacttaattatctgattttgggagataaagaagtacagataaaacaaaatatattgaataacgttctgtgtggattaatggctgacgaagtgattgaattagcccccactgaaccagaaaaacaattgatcatagatcaatggctagatgccgttatcagccaacttcccggctggaaaaaattaacccacaatgacgcgcggcaactgtttttacaacggcccggtcagttactaatagacgaaaaggaaatcaaaatcacggtacaacatcaaccgtttgatattctgttagccgattggccgtggccattaaatatcgccaaacttccctggctggattgccctttaaatattgactggcaaaacatttagaaggtttatatggactacctactgacaaataccccctgtattgtggctgaatcacactggatttatccccatttggaacgtatcgatctactattacagcaatactattataaaaagagcgaccagtacgattcattaccggaaagttttttattgaccgaagatgaagtcgaacaatgtttaatatcaccgcaaggagttcctcattggttaactaaagtcaataatcctatttgttatccagaaattaaggaaaacccttcccttgatgcattatcattgttggtcgaacgttttgaactgactgaatttgagcgtgatgttttattattaggtttattaccccattttgacagtcggtatcatgcgttatttgccgcgctaaatggcaatagtaaaaaacagtggcccaatttcgcattggcgattgagttatttagccaacaccaaaatgactggcaattactacaaaacagctttttaccgcaaacaccgttaatcaataaccaactattacggcttaataatcacgaagaagttatttggctacaaacacaattcttaactcataacgctatctggcattttttatcgggacaacgaacacttttaccacctttgataagctatgctaattggcatactcccgcctcacataattggtatccacaaactctttatcattcactggaaaagatattattgaatgaaaccgataaaatacgtccattggtcatactcagaggaaaagaaggcagcgccagagaattagcggtcagtaatattatggcatatcatggtattcataccttaatccttgatttagcctgcctgcccgatgaagaaaacagtgtcaaaatatccagcttattagcggatgtaatacgggaaactcggttacatgatgcctgtttattaatccgcaaattctctttgcttgcagcggaaaagaaaatattacaccacgaattatctattttactgaatcagccaaaattacgcgtggtttgcctggtagaatcgggaaatggattagcttggcttaaacatctaccaatggtgcaaattgacatgccagtaatgactttagcagagagaaaaacaatactgaaagcaaatttaccggagaatgtcgctcaggaaatcaatattactcagctctgtcagcgcttttcctttaccgcggaaacattaccgctcattcttgcagaagctcatcaatatcaaataattcgacaaccagaagatcaaataaaagaaatagacctgcgtaaggcattaagttttcgcgcccaacagaatttcggtaaattagcccaacgcataaccccaaaactcagtttcaatgatttagtggtttcagaaacattagcgcaacagttaaaagaaattatcgctgccattcattaccgtgaccagattctaagcgcaggatttcaggaaaaaatcagttacggtaccggtattagtgcattattttacggtgaatcaggtaccggcaaaacgatggctgctgaggtcattgctggttatcttggggttgatttgattaaagtggatctctctaccgtggtaaataaatatattggtgaaacggaaaaaaatatctctcgtattttcgatctggccgaagcggattccggggtgctgtttttcgatgaagcggatgctttatttggtaaacgcagtgaaaccaaagacgctcaagacagacatgctaatattgaagtttcttatttattacaacgtctagagaattatccggggttagtgattttagccaccaataaccgcagccatttggacagcgcgtttaatcgccgctttacctttattacccgttttacttatcccgatgaagcattacgtaagaaaatgtggcaaaaaatttggcctgaacaactgacattatccgatgaaattgattttgaacatctggctaaaagatctgatttaaccggagcgaatatcagaaatatcgccttattatcatccatattggcagcaaatgacaatattggacagattgaaaataaatatatagaacgtgccgtgatacttgaattaaataaaactggccgcttggtattttaaaaattaagtagaattggagtcaatatgacaactataattgcttctgacaatgcgattattgagattaatcaagcattaaatgatattctaattaaatatttagacattcccggtcaaaacattgatattcgttttgatctacccgaaattaattccattcaatcagaaccgacagtcagtgtatttctttatgaaatacatgaagatctacaattacgctctgccgaatcaagacgttataatccggcaaccaatacattattaccgggatgggtaaatattaactgcaattatttaatgacttactgggagccgaataaaccatcgaacgacagcgccagcccggacagccagccagataatcaggcggcacaagtcatgacgcgtgttttaagagcattgattaacaatcgccaattaaccggtattcccggtgcttatacccgggttattccccaacaggaaaatttaaatagcttaggtaatttttggcaggctcttggtaatcgccctcgcctctctttactttattccattactgtacctatgaaactgaaaaatattgaagacaatgtaatcccagtcagtaaaatatccgcttctgtggatcaaaaacccagtctggataattcacaaataaaccaagctttaatataccctatggatttcaagatgcatcgcgacggcaagggagtgaatccccgggagcatagataactatgtgaccggggtgaacgagtgcagccaacaaagaggcaacttgaaggataacgggtatagataaattatgcgtggaattaggcgatacagaagatgtgcgtcttgcccttgctaaagtgaatctgacaattgaacctgatacagaaaacaatcaaaacctggaaaatcaaaatgttattgttaaagtttcgggtattactagcgtaacttatttaccacaaataaaagatacacttaccaaatggaaaagcagtcaagaggctattgttaagataaatggtgtcggcattgttgtttctaaagaaaatgcggataagttaattgggatttaaaattaatttttatactaaaataacaaacaatcattcacctaataaataattatttattaaaattaattatttttaatatttttattttattttcccgtgttaccgtgttagtgttaataaaactaaaacagtgaaacactaatttaatccatatattatttactattcaatcaatccaatccaatccataggtggtaatatcatgccaataaatgaccttaaaaaaaaattcgaaattagccctcaagcagctcaagctattggtgctcctgcaagatcaaatagcagtaaacaagctgagcaccaaactgaacaccttgaacttgatacatctaaaaatagaagagatagaaaagatttaaatgcacaagccaccccaaatcaacagcacaccaaaaaactggaaaccgaagtaaataatggtggcaataaaagtaaagcacaggcgcatacaccagatttggtgatgaaaaaagaaagctcagtaacaccgaacactcgcaaaagtccgaatgagaaaatcaaagctgaagatattttccatcggtataaagatagattttctccttccgatagagaattaccatttgaaataatgaatgaaatcaccaataatggaatagcattctcctctgaaaaagcacccgaaagtcatttagataaagtaaaagataagaaattcacgctgaggcattatacttctggaaatgggcaggaaaaacctacatttaatgagattggatcaaactttaatttggtaaatgaaggaataaaaacattaaagcgtactcaaggaagcaacactaatgaagatgattggaaccgtctaggaaatacggcatttactttcttcttgttagcaatagatggagaagtatctgatagaaaattcctgtctaatacgactcactttgcagaaattgatatagaaaaccctgctgaacttaaagaacttgggttagatgaaactgagttctttgcttctcctgatttgcttcacgaaaaaaatctttcccaagcccctgctgtaaaagggaaactatctgacttaaaatcattattattaaaacaatctggcataaaaccagttcaattacagtctttaggtgcaaaagggattctggaacgtatagatagtaagtttaatggcagtcttgaaataaaaatcccaggaaacgtgaaagtgaaggaatggaaaaaagtcgagaaataaaaatttaatcatcgatattttattatcatctcttttcacacattttttcaccaaaatattaataggagataatatgttatccacagaaaaacacaataaagatactaaacacccaagaaatagagaaaaaaaattctcaatacaaccagaaaactctactcaagatgatgaggatataaaaaataattccttaggagttgggctagatttagatcaaatgataagaaatacgtcttccaccttaacaaatgcccctcaaaaacccgaagatggatattactatcatatttccagaggaaataatttacaaagcttcctacaaaacggatttaaaccgcaaggctcacctggcccaaccttatctgaagaagatttttcacgtagaaaaattggtatcataaagcttatctactctattatagccacgactattaataaaaaccgtaaagcaaagaaaatctctaaagataatttccttatgcctcaagaattttggcatgagttcaaaaatttttatcagaacatccccactcaaacaaatatcgatgatcaattattaaaaaaatccattacggaaagtatcgacaaacttgaccaaaataaatttatggagaagcacagtgaccgtaagcaaactattatcaacaatgagagagaagctattctgcaacaagatgaaaggattaacgaaattatttcaagcagagcaaaaatgatacagcaacgagaagctgaaaatacagaaggatatatctatcttgccccacacaaaaacacacttttggaatatatgaaacatttacaggaagaaaaaaatctatttcttatattagcagtcaaagaggacatattcaccgaaaaaggattagaacaagatccacaagaacctcatggggccgtcagatataagggagcattatctacagaagaacttaattttgttaatcaagaaggtcaaatctgtgcaatacctgcatctattggggaaatggattatggcgattttattttaaatcagcagcaagtcatagatttttgtaagaaataaaatgagggtaaatataatttcaaacataaaattatatttaccagagatagaaaccctacactttcggctcacataaaaggtggaaagaaaaataacttacgtgaaaagctattttttaatgaagacaaagatgatagaaaaggaagttattataaaagtaagccaatacatatcaaagatgtcagaaaaatgacctatcaggagatggaagaaattattaattccccggattatcatgttattttaggctatttttttagtcgcaatgatcaggctttgcgcttttataccaatacaaatccagtaacaagttatgttgataattaacctgaacttcgattaagagggaaattcaagacatcacagtccgctcagtttcttgcttaatattcattcaatataaaagaaagtatgctattattcacctatgaagaaaaaaaacacaccaacgccacatgacgctattttcaaacagtttttaagtcatattgatacggccagagactttctggagatacatttgcctgcgacattacgggcagtttgtgatctggatacattgcaattagcatcagggtcgtttattgaagacaatctgcgtgcgcattattccgacattttgtattcactgaaaacggtgcaaggtgacggttatgtgtactgcgtgatcgaacaccagagttccccggacaaaatgatggcatttcgattgatgcgctatagtatttcagccatgcaacggcatctggagcagggacatgaaaaattgccgctggtcattccggtgttgttctatcacgggaaaatacagccgtatccctggagtaccaattggctagactgcttcgatgatccagctctggcgaaggagctctattccggtccattcccgttggtagatgtgacggtaattccggatgatgaaatcctgacgcataaacgggtcgcgctactggaaatggtacaaaagcatatctggcagcgtgatatgatggggtcactgcaaaaactgtccatattgctggcgtatggttaccatacggaagagcagctaaaaagcgtgctaaactacttattacaggcgggagataccgccgatccagagggttttatccggcgactggcagagcagtccccgaggtatgaggaggtactgatgacaatagcgcaaagattggaacataaagcacgtcaagaaggacaccaagaaggacgccaagaagggcgtcaggaaggacgtctggaggcaacgttaaaaattgctcatgcattgctgaacagcggaatcgatcatgaaacggtgatgaaaaccaccggtctaagtcagaacgaacttgagcaaatacgccactaactcgtgctgggaattctttcagtattcaacgattcgtgttaaaagaaaatcttacggtgactggcaaaacagtcaccgaagtatgaatctcgaccgtgaaacggtgatggaaatcaccagggtgaatttgaacaaacgtccgacacacttactattaatacgttatcggcataaaaatgcttgagtcaatgcacaaaacgcatagaagtggcacatttacatgccaaaccaaagactgggtttaaatccacgtgcttctgaaatcgctgttctctcttttcaccccaataagcattctaactcatttcactagcaatcattttcatgattatatttttattcaacaattaatttatcgttgaaattattaaagaataaaaatacctggcaatgaaaaaccccataatcgcgtgatattattcaacatgaaaatcacacctgttatttattttcatgtttacagaaagtaataaattaacgctgatacacaaaatcatcaaaacccgccacatcaattaaaaataaatatcattattaattgatgctaccgcttaagaatccattctctataatcacctcgctttatcaaatgtgatttaaataatcattgaacacattctttaatacgaacaaagacctccataaatcaggttattgcggtagctatacccaatcgttagatgctaaggaaaacaaagtaatagatgtttttcttatatttcaaatgtaaacaatcaaggaaaaaatcatgtctacaactccagaacaaattgctgttgaatatcccattcctacttaccgatttgttgtctcgatcggtgatgagcaaatcccttttaacagcgtttctggcctcgatatttctcatgatgtcatagaatacaaagatggtaccggcaattactataaaatgcccggtcaacgtcaggcgattaatatctcactgcgtaaaggggtattctctggcgatactaaactttttgactggattaactctattcagcttaatcaggttgagaaaaaagatatttcaatcagtttaaccaacgaagccggcactgaaattttaatgacctggagcgtggcaaatgccttcccaacctcattaatttctccttcttttgatgccaccagcaacgaagttgccgtgcaggaaattaccctgaccgcagatcgagtgaccattcaagcggcttaagattcatttatcaagctgtctactcagaatattgcacaataattggaggcaacatgccaacggtaccaacctatcccggcgtttatatcgaagaggacgcctcacccgcactctctgttcagtccggtgcaacagcagtacctgtctttgccgtcgcaaaagacaattcattaataaccgatgattcttatattcgtgttaacagctggctggaatatctgtcgctcaaagggggacaatttactgccaccgataagcttgatatcgcactacgcgcttattttattaatggcggtggatatggctatctggttaaaaccgcagagttagaaaaacatgtgccaaaactcgatgatgtgacattgctggttgctgccggagaagaaatcatcactgccgcagacgccctttgcaaatctggcaaaggattattcgccatttttgatggtccaatcgctcaaataaccccagaccaaaaacccgatgacgtacttaaaccctataccgctacagcctatggcgcagtttattatccctggctgatcgctgaatggggagaaaataaagccgccattgatattccacccagcgccgtcatggccggtatttatgcccgtgtcgataacaaccggggtgtttggcaagcgccagcaaatgtcgctgttcaaggcggattgcaacctaaatatccgatgactgacgacctgcaagggaaatataaccagggtaaagccctaaatatgatccgcacttttcctaagagcgggacgctggtctggggcgctcgcacacttgaggacaatgatcattggcgttatatcccggttcgccgcctgtttaatagcgcagaacgggatattaaaaatgccatgagtttcgcggtcttcgaacccaatagccaacccacttggaaagcggtccaccgtgctatcgataactatcttcacaccctctggcagcaaggcggcttgatgggcagcaaagctgagcaggcttattttgttcaaatcggtaaagacgtcaccatgactgatgacgatattaagcagggcaaaatgattgtcaaagtgggtctggcggcggttcgtccagccgagtttattatcttgcagcttacacagaatatcgctcaataaccggaggaaatatgccaacaataccaacttttcctggcgtctatattgaagaagacgcatcactggcactttctgttagccagggaaataccgcaatacccgtttttattgggcgtttcttaccgaaaaaaaccagcgcaacacctgaaataacccgcgtgagtagctggttggattttactaacctatttaacgtaggttgtgttagatcaatagcaatcacatcaaccgaacccacgcctcccaaacccgaaccgactcctcctgaaaaacctcaaacagtcgaagacgatgtatcagtcaaaaacaacgaaggagttgaaaacgatacagaagttgcggccacgacacaggccacaacacccaatgcagatgaaactcctcccggctacacttaccaggtcgccgttgatatctacacagtaagcagtgatgctttaaaactttatttccaaaatggcggcggaccttgttatatcctgccaattgctgataccagcaaggctaacacgctggcattaatcccggcgttgattgagcaggctttagaaatcacgttaattgtctgtcctgaacaggatgctgattatcagagccagatatataacaacctgaccccttcattattaaataacggctattttcttatcgccgataaccaagataaagcaaccgctatcagcgctaatgtctcctcacaaactgcaacgtattatcccgcagtgaaagtctcacagctgatgcaaacggaagaggctctcgtcgctgtttcaggctataaagatgccaatacaaccccagacaaagtgactaatctggtacagctcaaagagaaaaatcccgatgtctatcagcaagcggtgattgcaatacagaacataagtaaaacgattcccgccagtgcagtgatagccggtgtctactgcgccaccgatgccagccggggtgtctggaaagcacccgctaatgttgcgctgagtgggattagtgatgttgcggatcgactcacggaagatgagcaaggcaccatgaatcaaaatggtatcaatgcgatccgttatttcagtaacaaaggttttgtcgtctggggtacgcgtactctgcaaaatgatgataactggcgctacattccagttcggcgtttatttaatgcggcagaacgggatatcaagcaagccatgcaatttgccgtgtttgaacccaacagccagcccacctgggaacgcgtccgctcagcgattgataactatctccatcaactctggcagcaaggggcactggccggtaacagcccacaggaagcctattttgtccagattggtcaaggtgtcaccatgtccgacgacgatattaagcaaggcaaaatggtggtgaaagttggcatggcggcggtccgtccggctgaatttattattctgcaattttcgcaaaatgtaacaccgtaaccgtatggggcgcggttcaccgcgcctgttctagtgaggaaccgagaatggaaataaaacagcccggcgtcaccatcacggagaacctgatatcccagcaacaagatgaggcatttatcggtgtaccggtttttatcggctatacccaaccggctaaaaacaatcatgctaaaaagaatcatgctaaaaacaatcgtattagtgacaaaacccccgtcaagatccacagcctgaccgattttaccctgtcatttggtgaatcaggattaatgtactattccgtgcgccacttttttgaaaacgggggtcaacaagcctatgtgctgtcgctaggatcggataaaccacgaggcgattttcaatcattgactaccaccctacaacaagattgggttaaacaagcgatttcggcacagagtgctatcacgttgattgtggttcccgatattgtttatctgaatcagatggatgctcccgattcagaaatcgatcaacacgataagattctattctggcaacagttttggcaatcagtactcaacctttgcaacagccgacgcggcatcatgggattactggatgcccccgatgatcccgccctggccgctgaatgtttagcccggttctcttccaatgatcggcaatggggtgccgtatactggccaaggttgaacagtgcttatcaggagcaaaatcagcctgttgtactttcacctaccgccgcagtggccgccgtcatccagcgtaacgataaccaaatggtcgtctggcatgcccccgcgaacgttgcgttagccaaagtcatcaacccgatacgctcttatattgaagctgatgacctgtttaatcagaacggcacttcgttgaatctggttcgcagcttccccggcaaagggacaaagatctggggatgtcgcacgctggacaatacgcccggttctccctggcgttatatccagacgcgccgtctggtttcttatatcgaagcccatatgactcaactgggccgggcctttgtgtttgaacccaataacgccatcacctggatgaagtttaaaggtcaggcttacaactggttacgtcagttatggctaaacggtggactgcgcggtacgcaggaagatcaggcatttgaggtgttactggggattgacgaatcgatgagtgaagcggatctacgggccgggaaaatgatcatgaagatcaggctggcactgttaattccggcggaatttatcgagctgaatctgacatttgatacccgcaccgggatcacccattaaacaggggcaaaatatgaacaatttatacaccccgtcggtatcacaccgttttatcgccagttttctgtttaacaatatccccagcccactcgacattgcctttcaacggatatctggcctcagccgtgagttgcaaactagccaacatagtcaggggggagaaaacgccagaaatacctggctggccgagaagatccagcatggcagtctggtactggagcgcggcgttatgaccgttacgccactcactctgacgtttgaccgcgtcctgcgtggtgagaaagccgtgtatgccgatgtggttatcattctactgaatgaacattcagttcccgtggcaagctggacgctaagtaatgcgctgccagtccattggtctaccggggattttgatgccaatagcaatacggtgctagtcaataccttggagttacgttatcaggatatgcgctggttaggagtgaaagcatgaccgtagaaattaaggagctgattattcaggctaaagtgaccgattcagccagtcactccagcacaccacgcacgctggcgcaggaagcgctggataacgcccaactgattgaaaaggtgaaacaagccgtgttagatgccttgcgtgaaacaggaggccattatgagcttaattgaacgcagcctgtccaaactcaccctcaccgctttcaaggaccgcgaggggaaaatctcggtaggcagtttgcaagccatgtataaccccgatgccatccagctcgattatcaaacccgttatcagcaggatgaaagcattaacagtgccagtcaaagcagccgctatgtattatcccaaccggcgggtctgtcattagttctgttatttgatgccaccatgcccggcaacaacaccgcagtagaaacgcagctggcaattttgaaagccctgtgtgccgtggatgccagtaccaacgttccccactttcttaaaattaaatggggcaaaatgcgttgggaaaacaaaggctattttgcttgccgtgccagtggccttagcatcagttacaccctgtttgaccgggatgccacgccattgcgggccagcgctaccttatccctagtggcagatgaaagctttgtgattcaagccaccgagcaacagttaaaatcaccacccgtcaccgcagtcaatgtaactgatatgctttccctgccgttgatcgccttaggtgccggcgcttctttggctgggggtattgattatctctcgctggcctggcaaaacggtctggataatcttgatgacttcacccccgggcaaacactgcaagcgcagggggaagcatgaagatacccgcaataatcatcaaaatagggggtaaagccctcagtcaatttacggttatcagtctgacaattaaccatcaaatcaatggcatcccctcggctaacatcacgctggggatcgccggtgatgccagccatatttttgacgccaaagcgcaagctgaactggtaagctgccgtccgaatcatgagcttagcgtgcagatcgaaaaaaacgtggtgtttaaggggatcatcgttcggcaaacattggggcttaaaggtcaggacaacctcattaccctaaccgctaaacactcgttacaaaaattaactcacaacttccattcgcaactgttcaacaaacaaagtgatgaggcaattctcaaaaaactattcagtcaggctggtatccctgtcacgataaaaccagcgcctcagcttaaaacggtgcatgaacaaatggtgcaattccgctgtaatgactggacgtttctaaaaaatcggctgctcgcgacccatacctggctgctgcccggcaacgatagcgtgacgctggtcaccccggaatccctgaaccggtcaaccgtgcataccctccaccagcgagccagccatcaggatgcggtgttatttgaagcgaatctgcaatgggataaccaacgcagtcccaaaaccgtgagtgtgcaatcctgggatatcgcccaacaaaaactgtctccagcccatcaggcaaaaagcagtggtctgggtcgcaatcaacttgccacagatagtctgacatcattgaccaaccaagcatggcaatgggctttcagctatccattggacaatgaacaggccaaacagcttgctcaaggtatcctgaataaccgccgaagtcacaacgtctccggtaattttgaagtcgaaggcgataaccgttatcaaacgggggatgtgctggcgttaagcggctttggtcaggggatggatggtcaggcgattatcaccggtgtcagtcacaccctcaatcaacggcaaggctggcgtacccggctaacgctggggctattaccggaaacagagcaagttgtaccaccggttaaagagctgcatgtcgggatcgtggaaaaataccaaaaagataaccagtcgctggggcgtattccggtcaaaatcccggcgttaaacttaaccaacggcaccctttttgcccggctgggtaaaccttatgccagccacgaaagtggtttctgcttctaccctgaaccgggagatgaggtgattatcggcttctttgaaggtgatccacgcttcccggtgatattaggctcgatgcacaatcctaaaaacaaagcgccattagaaccgagtgaaaaaaatccggtgaaaaccttagtgattaaacagggagaaaatcagcaagcattactctttaatcataaagataaaacactcgcattgaatagcggaaaacataccttatctctgcaacaggataaagatatcacgcttaattccgctaagaatcttattacccatgctcaggaaattaaaatagaggcgcaaaaatctctgtccgccgccggtaaatccggcgtagatattaaaggtgcgaagattaacttaacccaataataaggtcatgagatgacaaacaaagcactagccaataaagcatcagccgataaagtattagccgacatttacggtcggggttgggcctttccgccgcaattttctattaaagatagtacgtataaagatagcacgcatcctgaaatacccacgggcgtcaccatggcggaaggggccgaaaatgtccgccaaaatatgaaaattctttttctcaccgaacccggtgaacgaattatgcgagaaaattatggctgcggcctgaatgattatctgtttgccaatattcgtgacgaaatgatggcagaaattcaaacccggattgaagaacgggtattgcgttatgaaccccgcgccgatatcagcgaaatccaggtcaaccagagaaccgacctgcccaataccctgcatattcaggtcacctacacgctgagaggcagcgaaatcagccagcagattgaaggcgtcctcgaagtgaatgaaggccgggtacaggtgagtttatgagcaaacaactggtggtggatggcgatttcttgctgttcgaaccattatttggcaaccggcaagtcaccattctggggctggcaaccatccgcggtagcggacacgcccaaatccagggcaaaaagatcgttatgatcggtgatgaaaaaaaggtgcaatttcaggcgcaatatattactcccagccacccggtgcccggcatggggatggtcaccattgctcaattaaatgccagtcaacaagtcaacttttgccgcagccctgccacggtaattgttgtcgggcaacaatttatcgcccgatttaccccaacccaacccgctaataatccatcgagtggcccggatgtaacggtccccagtatgggtaaaggccggtttattgccagtcaatatgcggtcactgccggataaataacctcttcaactttattttaaataacaggtgatataaatatgggacaggccgagttagaaaataaactctctgctattgtgccggatactgcatttaaacttgatgaaagaagtacgctggatattttaaactggctacaagaatacgctaaaaaaatccctttcgatcaagagaaaaaacagttctgggacagtttttactttattcaagcaaataatccgcaacaattagcggatatttaccaaaatgtaaataaagccgatggccgattacccgctcatcaagcttttgttttggctttcttaacgttattagaaacaaccaaccgattgttaaatacctttccggcccggcaccgtgatctttattaccgggaattattggggctgaaacctaaaaaagcccaagcggataaggttgcgctaggaattactctcaatcctgacagcacagaatcgttgatagctcaaggcacgctatttgatgccgggcaagacagcgctggcaatccattacactatgcatcagatacggatttactggcgaaccaaggggaactgaccgacctatattggtaccgaagagataaagatggctggcaatcagcaaccccactgaaccactcagataatttggcattacccgaaaacggtattcgactttttagcccaacatcccatgatactcctgtgctgtccggttacctgattacctgctccttgtttgccatgccggcaggagaacgccgcattaaagtgactctggcaagcgaatgggcgggtaatactgatcacatcaccgctacaatcagcgctggagatcattggctctccttgtcaataaaatctatcgacaaaaccacgatagagcttggattatcatccagtgatgccgctgtcaccgcccctgatgccctagataatatggcgtttaatgtaccggcattaaaactgggtaccactcaaggccctattctgccggagattaaaggcatcgaagtcagtgttaatggcaaccgcagcgtgcgctatgcctctgacaacggtattgaacagacggataccgccagcttcccgtttggtcaatccccgtcgctgggttccggttttaatctggttgccccggaatggtatggctctgaaaacgcaacattaacgattacgcctcaatgggttggcttaccgacaagcagtttttcaacatggtatgacaaatataatccgaaacctgccagtaatggggtgttcaaagtacaaggttacttagtcacatctcaaaagagagacgctctcaataacgctaaatctcagtcattatttggtggaacaggtaccccacaaggacaaagtctgacattgaccttaccggtgatgaattatccccttgcagacagcccatcccccaacgaatggccggcatccgtgcgcatagaactggctgaacaggattttatgcacgcccaatactggcaaaatcccacggataaaaatgtcccctataccccgcaaatcagtgcattgcaggtacagttcaacgctaaagccaaacctgagcaattcaccgtttatcctctgaccccttttggccgggccgaggcaacagcaaaaatgccgacactcacccatgaagccttctatttaggctttacaggcgtatcaccgggacaaactctatccttatattggcaattagcagggattcaagccctcgctttatcctggttttatctcgacaagagcaatagctggaacaaattagatgaattagttgacgaccaaacccataacctgtttgaccggggtatctggcgtaccttattgccccaagatgcggcaaatcaggccgctctgatgccgccgggacgctactggctgaaagctgagataacggctcagaccgatcctcaggattaccccagcattaaaagtccgctatataacgccacgacagcgactttagtaaatgcccaagccattgaacaagctcattttatcaacggattggccgctggcagcattaaacagccaaccagcacattagtcgcaatcagcaacgtcacccaaccttgggcctcctggaacggtcgcccgccagaaaccgagcacgctttcctgacacgtctgcctgcccggttatctcaccgtaatcgggtactgagttggggcaacattgtcaccttattaaaagagcaatttgtcagcctgtttgacgtcaaatatccttctgccaatgaattaaccaaaattccggcaccagaaatacaacgactgattgtgatccctaacagccgttacaaagataacgatgatgtactacgaccaaaattaaaccctgcccggctggcagagatggtcgaatggatcaaacaacttagcagtccctgggcaacgattgaaattaataaccccacctacgttgacgttaatgtggactaccaagtgacctttatctcagggattaaccccgactacggccatcatcagctacaacagcaattacgccgaaaatatatgccgtggggcgaaaatccgactatcggcgtgacaaccggtaaccatattgactactaccaactgttagccaacatccaacaatccccgctggtggaacgtgtcaccaatttaagtataaccattgctaaccggaccacaggtgccataggtgaaagtatcgaagccgccgatgatgaagtgctgattttggtctggccagagaggcaccccttaaaccaaggagttaactcatgagtcatcaggatgccctgtttcccatcgtcaaagatgatattaccttcgatgccttactcactcaggccaaaacagtcatcgagcagcaatccggccaatgctggagcaataccagtgaaaatgatcccggtgtcactttattggaagcctgttgttatggtgcatctgatctggcttaccgtcattcattacctctgaaagatcttctaacccccaaacccgcggaacagatacccggcgacggtattttccctcaggagttcggcccacaacaaacactgacctgtggcccgatcacggcggaggattatcgccgggctttattggatttacatagcagcgacacagttaatgaaacaaacaacggttattttttctttaatgatgtccaactgatccgtgaacctgaagaacaacgctataaatattggtataacaaacaggaacgtaaatatacctttaacgatttgggtgccgacggcaaattaaccttgagaggaaattattggctttatttacttcctggtcaggaaactcaggccgataataagctggctcagcagaagctcaacgatttcctaaaaaataaccgtaacttgggggaatccgtcagcaaaattatctggctgcaacccatcaatttcctcttgcagattgatattgaacttaatgataacgtcatcgatattcctgatatcttcgctcaggtttatatggcggcggaacagatggtgctggaaaagcccgggcgctataccactcaagccatgaaagatctgggctacagtaatgaaaagatattctccggcccttatttacatcacggctggataccgacattacctcaaaccaaaaattacaccggcgctacggtattaaatctcagccatctggttaaccgattattggcgattaacggtattcagagtgtcacccggctagcattagctcatcacgacacaactattacgccattgtcgaacgataattggtcctgggagattgctcagggatattacccgagattatggggtaacgatccactggcattaattacctcaccagatagcccactgactattaccgccaaaggcggcgttaaaattgttgtttctaaacaagatatcgaggaaaagcttattgcagagccgctgatcgatacacagccggaattactggattggggtaaatatcgtaaagttctggattactatccggtgagtaataaattacccgcctgctatggattacaggccaaaaaacctacgccacagcaagtacaactgcaccaatttatgcttccttttgaacagatgttggctaacggctgcgctgaacttgccctcttaccgaaactcctggcttttaaacaacggggggagaccgtatatggtgtgcaatggccttttaaagcgggcacggtcaattacaacgttcatcaacagatcacctctgacttaaccgcaaaactaaactacgattcacaaatctatattaatgatgacattcagaggtccaactatataaaagagctggaaatcttagatcatctattgggttattttggcgctcaacttgccgccagaccacttaccctcgattttcaggattttctggatacccaacgcggttatttagcccaacaaccggaactgacctatcaacgtaataatattcggattgataaaatatcggcactacaaaaacggattgctgcccggttaggtttaggcggggaatgtttcagtgacacgcctgatctggctaatttgccattctatttaattgaacatcgccaattactaccggcaaaacccgatatccaatttaatactaagcaaaagcctgattctctggtggttgaagatgatcaattaagaatcacccaaaaagggacagcaggccgcttattgcaagggcaggtcattaacctgatcatcactgacaatgatagagaatttaccttgcggggtcagatgatcactgaagtgtcaggagagacattctcccttaacacacgcaatagcacgggtttaaagcacaatctggaaagaatactggaggcatttgagcaaaacaaattgttctggcaaaacagcccagtgtggttggaagatatggattatcaactggtttatgccgatgccacatatcaaaatgctaccgaagatcaacgttggatcacctccagcgcccaaagccccttcccggccatgattgaagaaaatgacgaaatcaccctgaaatatatcattacgccatctggaccatcccaaaaaacattagcccgtacagttcaagctgaaccgaaacccgaatatgaactcaaagcacgtgtcattaaatttgatcgtattcaaggcaagatattaattaaacgcaaccaagagtcacgggataattttccttccgagacagaagcatggcgctatcgctggtatttctccagtgaaaaatatgccctggctgatcgtttttcatttgtggttagcgtggtagtgaatcgcctgttaattgagagcaacaaagttgacccttataaactggaagcttgggtaaaaacggagattctctctgaatttcccgcacatatttcgatgattattcactggttatcaccgaaacattttgaagattttgccaatacctataaacgctggcaaaacaataatgcgcctttaggggatgaggcataccatattttagagaccttaaccctgggaagattaccttccgctacagccggtattggcagtatgcgaattgccaccgaacagcaacgtattgaagtcattggtgaatcgggcgatcaatggcatgaagacgtgataaaagataatcagctattatatgttccttatactaaaacggtagtattggtaaatattgacttcaataaagagaataataaagaaacgactgtttcagaacttctgtatcaaccggtagagaataaaggaaaattggtatttttaactgataacagtcaaataggccctgaatatgccgtactgaaatcagataatgtatggacagattaccatatcaaagtgaaaaagaataaaaatggggttattaccgatgaaatattgcatattaaaggaagaaaaaaagttggacttaatttatcatggacagcaatgaatttatatgatcttgatgcagatagtcgctggtcattctattatggatttgtattaggcgataacccagatctgtctggtgcattattccacaccgaagaaccgcttattttatcactcaattacatatctgaccctaatgaccttaaaggagaaatacggacaaaattcagctttaattttacttatgatggcaataacccttaataatataaaataaatatctcactgattaatacctcaaaacatttcaataatctcgctattatttgaatatattttagtataatagcaaacataatataaggtgataaaaatggtaaaaaaatataacctatatagttcagacgctaatctggaaagtacgaacattcaatcaacaggaccttccgtcggtgatttgaaaaaccgttttaaagagggcagtattccattacagaccgattatgccgatttgattaatattgccgatatcggtcgtaaagcctgtggtcaggcaccacaacaaaatgggccaggagcaggattaaaactggctgatgacggtacactgaatttaaaaatgggcacgctttccagcccagacttttctccattaatactcgaaaaggatattttatctgtagatcttggtagcggtctgattaataaacccaatggaatatgtgttggtcaaggtaatggtattgttgtcaataatgataatgtcgcggtcaaggcggctaacggtattaccgttaatggtagcggtgtggcaatcaaacccaataatggcatcaatgttgatactaatggtgtctcggtaaaatcaaaaaattccacgattaaagtcgaatcctcggggatatcggtaggaattggttggggagtaaaaatagggggtgaaggattagatattaaagccagtaatgggattaaagtcgatggtaatggtgtttcagtcaaagccggtttcggtatcacggttaattcagacggtgttaatattgatgccaataaattactctccaaaggaatgattgtgatgttttctggtagcagtgctcctagcggctgggctttttgtgatggtaataacggaaccccagacttaagaagccgttttatcatgtgcggtgaaactgtttctgaaacagggaaaagcagtaataaagccagtggaagtgggagtggaaaaaacgtttccagaaatacaacatcaactgcggtttcggtcaatgttagcgtgctaaacacaacattaacagaatcacaaatacccaagcataaacacattgagagcctgccttattataccactctgggattcgcatatgatcatacgactataggagcaactaacaacaaaatagataactcagttaacggacttatatggaaaaggacatctgggccagactatcatccatacacatcagatataggaggtggacaaggacataatcataatgcatcagcatcatcgccttcacatactcacagtgttgatgtcgttccgccttattatattttagcttttattatgaaactctaacttcaccccacacagaaagacctaaattttctattttttactcattaccaaggatatattgatatgacttcggagccaaatctgttaaatcggattaccattactattgaagctaataatcaacaggtggctaaaaaagtattgcatggctccctgcttaatcagaccaatataaataaattactcaattcatattttgatgaatatcatattcatcagaatatcgctttagagaaattaacgctggaccttggtgaaataagtttccatgattttaattcattattcccggctcgtctcaaagttgctctgaataaagcgctcagccaatatcagacaaataaccatagggaagaaactctactgaataaaccaacatccaataaatttaccgataggacctctttatccagtgaaaatcatttaattaatgcagagaatttcattcatttcttatctcaaaaaggtccgcaattcaatccaatggaggtcataacgaataataaaaatagtgacatcaagattaagccattaatcaatcaattaatgcagatagaaaaccaatcagcattattattagcgaaaggctgtttatctgaacagggtctacaacggcttttagctatcagacaaccagtcttattagtcgccattaaccgtagattatccgcaagaataaacaaaccacaacatcaggaggagcgagtctcctccgggcaactgatacttaatgcactggaatatatacagcggcataatactcaggaaatacctaaacccgatgcgaaaatcatctcacgtattaccattgaactcgataacggtgtacttaacgcggcacctgttattacattactccgccaagctataacccgcaatattccattaaacaatattccattaaacaatatcccattaaatcgttggctaaaacaactctggcaaaccgtttctgtttcacagctttgcaaaaagcatctgcccgctgacgaatatcaatatctattggaatattttacgctaaaccacacggataaaaatatatccgataaaaaaccaaccattactcctgttgatatttctaatattcaggcataccaacacttgccgaaatattttactgcaaacaatgcaggcaagaataaatctgatacagaatcaaccatgaataacgttaatttttcaaatgttcaacaacatctgaccaatcaaaaaatagtatcagcacccgataagacacctattataggcaatcattataacccacatcaaactagcaataagtcacactctggatgggctttattaacggataaaaatacatccgataaaaaatcaaccattactcccattgatattgctaatattcagacataccaacatcaggctaatcagcaagtcatcaccgatgatcaaaaaatagtatcagcaccggataagacaccgattacaggcaatcattataacccacatcaaactatcaataggccatactctggacagactttattatcggaacaatccctgccataccagataaataatgccggcatattaattctgtggccgatgctacccacactatttaaccagcttggtctacttgagaaacagaaattcattcatcgtcaagctcagctcaatgctgttgatttacttgaccatctaatttggggaaccgaggagaaaccagcagaaagaaaattactgaattatgttctgtgtgggctaatagccgataaagatattgaatcaatccctatcgagccagaaaaacaattgatagcagatcaatggctggatgcggtgactggccaacttaccggctggaaaaaattaagccgtaatgatgtccggcaactgtttttacaacgaccgggtgaattattgacagatgagcaagaaatcaaaatcacaatacagcaacagccatttgatgcgctactgattgattggccgtggccattaaatatcgccagacttccctggttggatcgccctttacgcatcgactggcaaaatatttagaaggtttatatggattacctacctacccataaccaccatatagtggcagaatcacattggatttatccccatttggaacgtattgatctgcggttacagcattattattaccaaaagagtgacaaatacgattccttaccggaaagttttttacttaccgaagatgaattagatcagcgcttgaaaaaaccacagggcattccccattggctaactaaaccaaataatattgttattccgccagaaacagaaaaaagcccaactattgatccattatcaattgatctattgtcaatattagttgatcgttttgaactgactgaatttgagcgagatgccttactattaggtttattaccccattttgacagccgctatcatgcgctatttgctgctctgcacggtagcagtagaaaacagtggcctacttttgctttagcaattaacctattcagccaacgccaaagtgatcgacaattactgcaaaacagtttcttaccgcaaacaccattaatcagtcatcaactattacggctcaataatcacgaagaatctatctggctacagacgcaatttttaactcacaacgcggtctggcattttctatcaggccagcaggtcattctaccaccgctaataacctgtgcttattggcattctcctgcctcacatcgttggtatcctcaagccctttatcattcattcgaaaaaatattattgaatcaaaccgacgaaatacgtccattggtgatacttagaggaaaacaggacagcgccagggaattagcggtaagccatattatggcatctcataacataaggactttaactcttgatttagcccgcctgcccgacgaagacaatataacggtaataactaacttactgacggatgccgtgcgggaaacccggttatatgatggctgtttattaattcgcaacttttctttattcacagagaaaaagaaaatattaaataacgaattatccactttactaaatcaacccaaattacgcgtggtttgtctggcagaaccacaagactcattaatctggattaaacatctgccaatggtacaaattgatatgcccgctgctactctggcagacaaaaaaaccatgctggaagccagtttaccggataatatcgttcagaaaataaatatccctcaattatgccaacgtttttcattcaccgcagaaacattaccgctcattcttaaagaagcacatcaataccaaatactccgacaaccagcaggtcaattggaagaaactgatctgcgtaaagcattaagtttccgtgctcaacaaaatttcgataaattagctcagcgaatcacccccaaacgccgctttaatgatttagtcatttcagatgcattaacacaacaattaaaagaaattattgccgccattcattatcgtgaccaaattcttagtgctggctttcaggaaaaaatcggttatggtaccggtattagtgcgctattttatggcgaatccgggaccggcaaaaccatggccgccgaagtgattgccgggcatcttggcgttgatctggttaaagtcgatctctctagcgtggtgaataaatatattggtgagacagaaaaaaatatctcccgtattttcgatctggccgaagcagattccggcgtactatttttcgatgaagccgatgcgctatttggcaagcgtagtgaaaccaaagacgcccaagacagacacgctaatattgaagtttcttacctattacaacgactggaaaattatccgggattagtcattttagccaccaataatcgcagccatttagacagcgcatttaatcgtcgttttacctttattactcgctttacttatcccgacgaaatattacgtaaaaaaatgtggcaaacaatctggcctgaacaattgcaattatctgatgaacttgatcttgaacatctggttaaacgcactgatttaaccggtgctaatatcagaaatattgctttattagcatcaatgttagcgaaaaatgatcattgcgaacaaatcgaaaacaaacatatagatcgagcggttactctcgaattaaacaaaactggccggctaattttttaaaacctaacaagattggagtcaacatgacaacgataattgcttctgacaatgctattattgaaattaaccaagcattaaatactattttatcccagtatttaaatattaatggcaataaaattgatatccgctttgatctacccgaaattaactccattcaaccggaaccgacagtaagcgtatttctttacaatatacatgaagatttacaattacgctctgctgaaccaagacgttataatccagcaacccgttcattattacccggctgggtaaatatcaattgtaactatttaattacttactgggatgcgaataaaccatcgagcgacagctccagtccagacagtcaacctaataatcaagccgcacaagtcatgacacgggttttaaatgccttgataaataatcgtcaattaaccggcattcccggcgcctatacccgggttattccacaacaggaaaatttaaatagtttgggtaacttttggcaagcgcttggcaatcgcccacgcctctctttattatattccattaccgcacccatgaaactccaagatattaaagaagatattacaccaattagccaaatttccgcttctgtggatcagaagccaaacctggataattcacaaatcaatcaagctctggcagataaattgtgtaccgatttaggtggcaccgaagatattcgccttgcgctggctaaagttaatctgatcaccgaaccaacaacagataataattataatcaggaaaatgaaaatgttgttcttgaagtctccggcatgaccctttcaacctatttacctaaaataaaagatattctctcaacctggaaaaatagtcagagtgccataattaagataaacggcataggtattattattgttgaagaaaatgctgataaattaattggaatttagcattatccagcctattgtgataggtaaaacgcactatatcacaatcatttccatacattaaacattcaatttccatacattagatattcaataaaggtgataatatgccaaacaaaaaatacagtgaaaatactcatcaaggaaaaaatcctctaatgaaatcaggggcgaataatgaacatgatctacaagattccccattaggcatcggattggatttaaatagcatgctggtaaatagctctaccagtttaagtcaaatccaggattattcattttggaaagaaaacatttccgaatattacaaatggatggttgtcgttgaatctcatttaaaacaattggactggaccttaaaatcaatggattcgcctgaatctgccggaactaacgtagccaaaaatatgggtgttactgcactgcaatctctattaaataccggaagcagtatagccggcggcgctattggaggagccatagggagcgcgatagcaccgggtgttggcactatagctggcgcgggtattggtgcattagccggaaccggattaaattaccttaatgacaccgctatgagtaaattaagtaagaagcttgaaatcgctcatccttaccctaaaacaagaaacatgatacttgatatcaataattacgataaaaacccgatcattaaagcaatcaaaaaaaacgtcaacaaagacaacttaaaagtcacggcgggcagttcattaacatcgaaacttgtaggaacagtcacctcaccaataaaatttcctgcctataaatttgctgagctggctgtatcacatcatagggcattagaaggattgagtgacgataaagccagacatatattagatttcaccaatagtatccgtgaagttcttaaggaaagccattctgatgccgttgcatttatgcgtaagaattatggcgataatgcaatgggtctttctggattttcttctaaaataaagagagaaaaattaaccttgaatacattagcaaagacaaaaaatgaaatagaaaatagaattaatagcatcaataaacaaacattgaaagtttcttcaagaagtcgaaatgaataattaatctgtattaactcagatttaccaataccacagagttaagctcgttaatcctcttaacgagcttatacctgttatctttcaagttgcctctttgttggctgcactctcttaccccggtcacataatttgctatgcccccagggattcgctcccttgccatcgcgatccatcttgaaatctattgggtatattatcattctgttgccagtaaaaataatcccgccagcaatttttccccctcttttaccatttccaacaataagttacctttaaaattcacctaaaataaacctgataaacaagcgctatacagaaaataatatatacccgtcatctttcaagttgcctctttgttggctgcactctctcaccccggtcacagagttacctatgctcccggggattcacgcccttgctgtcgcgatggatctgagatccatagggtatataactaagatattatactactgactcacaacttgatctttagggttaaatgtaaatacagcatctgttgcctgttttacatttatacctttaggtaatttaatttgaacaataggtaaaaatttacctgtcgcatctttataatcacgttgatctttttgtgcattaactaaacctggattttctgaataaaaaagggcttcaataggtattgtttgtggcttattctcatcccaaggttgaacgactatctcattataatttaaaccattaccatgataaggcattgcaagcaatgtttgataaaaagcatctgctggatttttggccgtcggtctaacatcaaatgcacagattccccctgccgattttcttgcaatcgctttatttaattgatgagcggtgaaaacaccaaaatcttggcatgatttcccatctgaaggtttaggcggtgcaccacagtaatttccctgacgcgcccaagtattggcatcaagaacataggagcataatacaggaactttaaccttatcttcaggggccatctgttcaggaaaaagaataaaaccattaatgctagcaaatgtattgccaaatttagcatcttttcttaaatatgaaaaagaaactccattattttttatagaagatggatttaacttccaaaatttaaatccaggccgagtccctctcatcaaaactccagaacaaagaaaagcaggtgatactcaatcacctgcttttctttgctctggcgttatattacggggcactatacattcaaatgattataaattttggcaacctagcccatcatctataaaaagtggtggtgtctctttttcatatttaaggaaagacgctaagtttaaacgcttagcttatggatataaaaatggatttattattttccctgaacatatcgcacctgaagatagagtcgacttttctgtattgtgtgcatttcctattgatggctatacaaatgagagggcgaatcaaggttgtggtgaaaatattactaaggcgaaagataaaggtaaatcttgccaagaacaaaatgtgacgaattccgatgattggataaaaaattataggaaagtaaactctcaagatttttttcaatgtggatttaatgttactaaagatgtcaataatccggctatagctttctatcaaatgttagaaagtatcaaaaaacttccacgtactcctaatactccaccaaaacagaatgaaatcagaatttcaacctgggaagaaagtgatcctaataaattacctattgaagcccttttttattcagaaaattcaggtttagctgatgcccaaaaagatcagcgtgattataaaaacgcaacaggtaaatttttgcctattgttaaaatgctactaccaagaactttaaatgaggatgcattattcaaatttaatattaaagatcaagttattaatccataaacgattattggattactgtaagctctatttttcatactgagcttactgtaatccaccttcactcttcgtgatgaaacagaactccactttgacatcttcctcatcctaaagagggtgtcgcaaaaggccagcattaaaaataaagccaatccactgatcccaagcaataaaaataaccctattcattatccccgacttgtcatacttaaaattgaacgaccagaaaaatcagcatcaactaacaatctctgctatcaattgatgttgagtctaaaaatccacctccaataattgttttttcatgtaaacttatttaaataaccattgaattaaattttcaaatataaataataacatctataaatcatgttattgcagtagatatatccttcaataaaaactaacgaaaacaaagcaataaacatttttatattttaaatacaaatagtaaacaaaggaaaaatcatcaatttcattgttaaataaaacaacccaacattatatacaaggtgataaagatggagaaaaaatataaccggtccacttcagaatccaatacagagaatatcaatactatggatcgccatgaagttggtaaaacgccctgtcaaactgataagccaaattcagcgctaaaaccgggtgatgactatacacaagcaataaaaattaaccctgacggcggcttaacagcagataaagatggattaggtgtaaaaattaaagtgggtaatggtattaaggtagacagtagcggcatcagtattgatcccaataatgtattgccaaaaggaatgattatgatgttctccggtagagatgcccctacgggctgggctttttgtgatggcaataatggaaccccagatttaagaagtcgttttgtcatgtgtggtgaaactatttctgagacagggaaaagcagtaataaagccagtgggagagggaatggaaaaaacttttccatagatacaacattaactgtggtttcggtaaatgttactgtggaaaatacaatattaacagaatcacaaatacccagtcataaacatattggaggtatgccttattattcttgctttggaaataaatatgatgctgttagtgctacccaaaccgaatgccaaataaatgatataccagatagctcaatatggatgaaaccttcatccggacttaattgctatgccaatacatcaaacacaggaggaggacaaggacataatcacccggctacagcatcgtccccatcacataatcatagtattgatatcattccaccttattatttactggcttttattatgaaactttaattccgttgcaccaaaatatttaaatcatttatcactttctaaccacaaaggatatatagcaatgaatatatctagttatttcttcctaaatgaagaaaacattagatttaataatcaatgtttaaatacatacattggctacccccaacccatcagtaaagattggcccaacctgcttgccgggttccaaagatatattgacgatattattaatttaacccgaattctggataagaaattgacgagaagcctgttccaggagcaaagttttggtgtgcaccaaaaacagctccgaggggggaacaggctatggacaacttagttgaaattttctgtgatgtcgatgatttttgccgttttttcatccctcaatgggaacaattttgtctcgatagcgggcatcgtttacgccgccgacaaggtcatatgtatcccagtgaaatcatgaccattttgatcctttttcatatgtcgcattaccgtgattttaaacatttttatctagaacatatttggaaatatcaccataaggattttccaaccttgcttagctatcctcgttttgtcagtgtggctccttccgttttggtgccattatgcagctatctgactcaattaaaagggaaacccacaggcattgcttttattgattccacccgtttgagtgtctgccataacattcgcatccctcgacataaggtctttgcggggatagcaaagcgcggaaaaaattcaatgggctggttttacggtttcaaattacacctggttgtcaatcatcagggtgaaattctcgcgcttaaagtgactccgggtaatgtggatgatcgggaacctgttcgtgaattatcaaaagaattaacgggttctctttacggtgacaaaggttacctcagccaggaattggcggacgatttagctaaaaccgatgtcactttcatcacgaaaaaacggcgtaacatgaaagcgagtatgcaagctgagtgggataagataatgttaaaaaagcgttttatcattgaaacgattaatgggcaattaaaaactctttctcaaatagagcattcccgccaccgaagtataaaaggctttctgttgtgcgttttaggtggattgattgcttactgccttaaattgaagaagccatcactgaaagttttctactcagaagacgatttttcaatgacggattaagcagaattcgggttaatttaaatggttttttatattttttcaaaggttcactgtatcttaaatttgatatcgcgaaagcagaggtcgttgataggccaaatttcattgtggatggctggcctgggttagaaggaacagaatttgaaaatggaatagatgcagctatagaattgaccaccaacaccgtttgttttttcaaaggaaaatattgtgtagattacaccatcgattcacacacaattaagatgaatactatttcagaccggtggggaatgaccgggaaatatgcagcatttagtagcaatctggatgccattatttcatggccagatatcgatggaaattttatttattttttcaaaggggattcttttattcggttcgacccaaatttgaatgcacttgatgccgggccaatcatcatctccagcgataatgagggttggagaggattagccttcaaaaatattcaagcggcggtatcggtcgatactgatttattaggcagcaaccgagacaatagtggaggcaatagtaaagtctgtaatggaacatgtggtactaatgacacgggtaaatattgtttccagttacctcaaagtattagatttggtttgatagcctacgctaatacaaatatttcgcaaactgtaaaagtatatattgacgatcttctggtagatacattaaccggtaaagggcaaaataatttaatggcgactaaagcctacacatcaggtacaggcaaaatctgtattgagattgaaggggatggcaaaccatgtaagctacgttatttcgataatatatttgatggaaaaccgggaacagctattatcagcgctgaaaatggtaccaatagtcattacaatgatagcgtggtgttcttgaattggcctctgacataaactaaaaatactcggtttcgaataattattgcgccctccgtggcgctttttttcctactcatatgactaccgtaaaataaatagtagtatttggaagaaatacagtaattttgccggacatttattcaagctcactctggctcagaccggtggttttcatcactgtttcacaatcgattccgctgttcagcaatgcatgagcaatttttaacgttgcttcttgacgcccttcttgacgtccttcttgacgtccttcttgacgtgctttatgttccaatctttgtgctattgtcatcagtacctcctcatacctcggggactgttctgccagtcgccgtaagatcctcatctcacacggatcgttgaatgctgattgaggactctcaagacgagttagtggcgtatttgctccagttcgttctggctcagaccggtggttttcatcactgtttcacaatcgattccgctgttcagcaatgcatgagcaatttttaacgttgcttcttgacgtccttcctgacgcccttcctgacgcccttcttgacgcccttcttgacgtccttcctgacgtccttcttgacgtccttcttgacgtgctttatgttccaatctttgtgctattgtcaccagtacctcctcatacctcggggactgttctgccagtcgccgaataaaaccctctggatcggcggtatctcccacctgtaataagtagtttagcacgctttttagctgttcatccgtatagtaatcatacgtcagcagtataaccaactcttgcagcagctctgccatatctcgctgccggatatgcttttgcaccatttccagtagcgcgacccgtttgtgcgtcaagatttcatcatccgggattaccgtcacatctaccagcgggaatttattggaatagatttcctccgccagggccggatcatcgaaacagtcgagccaattggtactccaaggatacggctgtattttaccgtgatagaacaacaccggaatgaccagcggcaatttttcatgtccctgctccagatgccgttgcatggctgaaataccgtagcgcattaatcgaaatgccatcattttgtccggggaactttggtgctcgatcacacaatacacataaccgtcaccctgagccgttttcaatgaatacaaaatgtcggaataatgcgcccgcagattgtcttcaataaacgaccctgattccaaccgcagtgtatccagatcacaaactgcccgtaatgtcgcaggcaaatgtatctccaaaaagtctctggcagtatcaatatgacttaaaaactgtttaaaaacagcgtcatgtggcgttggtgtattttttctcttcatcggtgaatggtagcatactttcttttatattgaaggaatattaagcaagaaaccaagaggactgagatgtcttgaattttctttgacaaaaactttgatcgtatctcagatactttaatttccttcttaagcgaagttcaggttagttacctttcctgcaaatttccgctatttacctgctccaatgatttaagtaaatgttttgcattagcggatgaacgtagtaaataagcagtttcttcaaggcttgcatattctgcacttgaaataataacgcaatcaccgccgttttgtctggtaatcaatattggtgtacaatcctgaacaacttgatccattatcgaagcaagatttccctttgcaacgctatatattgtcttccgcataatatgccttttccaccgtagtataaatatcgtacaaagattgtatgacaaaatagtataatatcaagctaaacatctatatgtgctatccgtggcccaatctctttattcgcacgatccctatccgcccatatgtaaaagttgatagctttatctgattgcaaatcacctttgatttgcactatgttacttgaccaattctagttaaaataataaaataatggtcaagaaataggaggttttatgaacaccgcaaccaaacaacgtaatttgaatgagctacaggtgttactgcaaaaacgctttgacataatattcggctcattgatgcctgagtttgctgaaaaggcgaaggccagcaatgctcttgttcttccggatagcgaactttttgggctgctgtactcaaccgtacttgaaaagagtgccaggactcccgatcgcgaactccgcaaactaaagcgtcgcgctgagaacctgtccaatttttataaggaaattgagcgcatgggtggcgtaattaaagcagtagatgttgctgatattctcggtatcacgcgtcaggccgttaatttgcgagtgaagggaaataagctgctcgctttcaagaagaatagtgatcatgtcttcccgctctttcaattcaaagaggggggactgttacctcactttgaagacgtcatgaaaacaatgagcaatgatatcgggcctatttccagaatatcgtttttgactacccccttgagcgacaagaacggtaaagggaaaacccctatcgagatcatgaaagaagatagcagcattgatgatgtttcaaaaatgcttcgtgcagcgaaacagatgggcgaacagatcgccagttaaaagcgtgtcctttcgaaaaggacacgcctagtacaaacttaaagcgggacaaccttgaatcgaagcacgtcttcgagcagttcttcagccgtgatgctggagtatttccagttcgatggcatgtattctgaatcgtggtattccgcgagattcttcattcctacatcttcaaacctttcttcatccgattcccagactgcatagcagaaatcagtggaaggaaaatgcctcgataagtaacaaacaccgtcaaacttatctctggcgagcttgtagaggcacgcaattactctctgtgtcaccgtgtagtcatctccgactgagacgtctaacgtaatgtgcagcattcccagaagtttccccacatcgacaaaaacgagtggccggagtgggcgaatcagacacattcgtgagttttcaataacagactcctcaacgaatttccgcccatctttatgtatcaggtgcccaaaactttcagcaagcgctgaaacggccttgtctgccatgtagcaaacaccaaaagtatcatcaggagcgttatatcgaccgtcaccagtggagaaatttatagccgatggccattctttcctctgccagcgttttaagtccccattaccaggtgaatgcgtcggtaatgaatcatcttcaaagattgccgtaatttcttgatctaaatttggatagtcaaactttgaaagagaagtctcctttgtttgcattgtgaggtacccccataaataagtttcgccataggcttttccttaatgtttttttgaaatggtgccgtgtgcttgcccactgacaccgctataccgtgattggctcgataattatacgacaattaaggtggttttaaattgattgattttttggggtttattagaccactacatttctcgtattaataataccgaatctaataagcaaaaaataacggtacaacctcaagctaaatatccattgcgccatccgtggcgcactctctttattttccctacttacaattaccgtaaagcatccatttaattaagcggtagcatctgaaatcaattgggttgccggtacatcctgtccaaatcctcgcaaccctaccacatgcacatgttcgtggtttttaaataccttacgcaccagtttataggtggtccctttttcagggctgatattttccggggcggcgataattaactgcatttgcagacgctcacataattcaaacaaagtagcgatagatttagcatccaaacgcgccgcttcatcaaggaataacaatcgacaaggggaaatatctttaccacgcaaacggcgggattcttcttcccaactctgcaccaccatcaccaaaatcgacatgccggtaccgatcgcttcacctgtcgatagcgcaccactctccgcttttaaccagccatccgatccacggttaacttcaacgtccagttccaagtagttacggtaatccaacaactcttcaccaatggtttgcggcaagcgctgtcccatatccacttgcggattcagacgctgataaagttttgccattgcttccgagaaggttaatcgctggctgttaaagagatcctgatgctgttcttgctgttcagaaagtacatccagcaatagtgcgtggctttcacgcacattgacattcaacctcacaccacgaacctgtccgaaggaaacagcttgcagcccttggtttagcatgcggatacggttctgctcgcgctgaatggttttgcggataatattcgccacactcttcgaactgatagccaatttctgctcgcgagcggtcagctcttccgtcagacgggccagttcaatttccatctgttcaatggcatcaaccggatcgtcagtgcggataatatcctgacgaatacgttcacgtagatgctgataaaccgcaatgaagaattgaatcttacgttcagggcgttttggatcttcggataaacgcagcgcatcgcgtagatgctcgttatcggacaccgccagacgcaacgcacccagtgccttatccgacatggaacgtaacgcgccaccctccatatacgccagttcacggcgatgcagacgacgctcaacgccattgtctttcaccatgcgcatcaccgcacaccaacccgctttggcagaaaccacctgttcacggatttgatagtaatcacgttccagcttacgcagttttttctgcaagctatccatttccgcttcgcaaaaggcgatctgtttctcaagttggttgactctggaacggttagcgctaagtgcctcatgcagttgatcacgacgctcgcgggcgcgcatttctgcattggcatccgcccgcacaccaatctctttcatctcttggtgcaactctttcagcatatcctgtttggtttcgtaagagctttttagcgatgccagcacttggttaaattgggaatactgcgcttgctgttgacgcaattgttcgcgggcgcgactgcggtccgattctgcatgttccagacgctgacgcagtttatcattcagatccgcattttcactgagcataccggcagaatcgctgtagctaaaatgcgcacggcgctgcaccacttccaccagcgcaaaagcctgttgtttagcctgatgctgactctgtttggctgtttcatagtcctgttgcaactgttcatgctgctgtggatcgctttgcagaaccgcaaccatcggctccaatttcgccagtgccgagccatgttgttgcaggaaacgagctgcttcctgcgcttcatccagctcttcacgtatttcttctacgcgatcgattaaggtttcatccagcaatagcgtaacttgagggatcaggcgatttaatgtcgtcaggctctctttagcctgagtatattgctgacgctgttgttgggtctgctcttcaaaccgggatagttcacgttccagttccgtgtgacgctgccttagttcacggatttccgcttccggatcggtatcaaatgccacagagaggtgtttacccacaaactggctgaatgcctgatgcgcacgctgaattttctgcacatcaaaagatagcgtggcataacgctctgccaaggtatctcgttccagattcaaggcttccagacggttttctctggcggcacgaccaaacaatggcaattcaggataacgggaataacgccattgacgatcagacgatttgaccaataccgcgtttgcctgctcttcggcattaaatacgctgtcatcaaaggattgtggatcaccttctattaagtaaagatcttccgggcaatcttccagcgtttcaagatgtgaacgtactaaggaaagatcgggcaccacaatgccatgtcgagctggcccatacaaggcagagaagtacggtgcatcatcaatggtgatgtcgtcataaatttctgacagcaaaactccaccgaaacgttccgccagcgcaatcatccggctatcttccgctccgctcggttgactgaggcgctcgatctgcttttccaactcacgtttttgcgccgcaacttcatctcgctctaccgttgcctcacgttcacgttcaagcaactgctgcatatattccgtcacgtcattactgctcgccagcgcttcaccattctgttcacacagttggctcagggtatcctgcgcagccagccagaccggggcacgggcagtcagtgactgaattttctgtttcagttgttcaagcgcctgacgcatctccatacggcgttcaccgctttcattaacgcttaagcttagtgcttcctgccgtgcttcaagttcactctgtaacccttccagatcttcggcctgatattgctgcccctgacgtttacaaaattcgtttaataaaaactctgcattttgttggttggtcaggcgttgctccaattcagccaatcgcatccgcaatggttgcacccgatccgccagatgttgctgtgacggccagtcacgcagcaattcacgagcactctgccacgcttcactgcggctgatttcacccaccatgtttttaaccagttgatatgcccgctcaaactggctatgagccgcatctgcaacacttaatttctgttccaatgtcagcagggattctgtcgcctgttgctctttagcctgaaaagtttccaaccatgcttctgcattatcagcggcaagatccggtagccgacaaagctcacgagcacgttccagcgcttgtaacgcctgttgatactgaatagcgcgggtttgctgaacatccagtgcttgctggtaatctgccaactggcttttcagctcatcgacttcctgttctgccgcttccgctctggcttcatattcagcttgaagttccgctgcttcttcaacaacctcagtctgctcttccagacggtaggagagttcttccagatctccctgataacggtcaattttttcctgctggcgcatggctgtctgcaccagattcaggtgatcactggcggcctgatgatcagcttctaaatcaacagaagctccactctgttcctccagttcccgcgccatttcgacatgacgataccgttcggttgccagttgcctatggctaccaaatagctctccacgcaatgccagtgcttgatccaaataagtacgccgctcattggcgtggcgcatatagtcagcagaaacgtaagcagttgcttcggtgatcaagtgtttgaacagatcgcgatcagattgagttacccggatagcttccagcgttatacggttttcacgcagtgccgcttccatatcctgaaatgccttgcgaacaccactgttttccggcaacaggtaatcacgcagggaacgggtaatggcgctggaaataccgccgtacagggaagcttcgatcagacgatagaatttactacggtcactggctgaacgcaagcgtttgggtatcacccccaaatcaaacatcagcgcatgataatcggtaatagagttaaattgtttgaactgcacgccttccatttcatcaaggcgatctttcagttcattcagtggcaatacacgtgcctgtctttcacccacattttcagttaatagctgcgtaggttgcatagcagttggcaagccttggatcataaagggtttgatgtcaaccttacggtcacgtcccgccacctgttgcaatctcaccccgaccaccacccgctgatggcgggagttaatcacatccaaggttgagtaacagacccccgcccgcaatttgccgtgcaaacctttatcacgagaaccggaagtggcaccggcttcggtggtgttacggaaatgcaacaaggttaaatcagggatcagcgcggtgacaaaagccgccatcgtggtagatttacccgcgccattaccgcctgataaggttgtgactaattcatcaagatcaaatgttctggcaaaaaaaccattccagttaaccagcgtcagtgaacgaaatttaccgcgttcaatcatggttgttcatctcccgtaccttctgctgagttatccgatgtttcatcattttcactatcatcaagcgacaagccgccttcaatcggcattgcctcaccgtcacggatcatcctcagttgtacttcacgaggatcgtcgccactgcgcacatccgcaccaaaacggaataccgcctcagtaatggtaaatttgttgttgtcatttggcaggatatagaccatccccagacgacgcagacggttcagtgtcgtgcgcactttttcctgcaatttctgtttatccaaatcggaaccggaagagcgctggttgacaaacttcatcaacttgccctcatcggccagtgagatcagctcttcgtacagctcttgagcagtaaaaatcccctgattagccagccgttccgggctgagatagagataacagagaatttttcctaccatcatatccagctctgataataccgagcgcgggatcaatgtggtcgaacggggacgcagatagaagaaaccttctggcgcacggatcaactccacattatagcgggcgtaaaattcctccaattgctcctgaaaatccatcagataagcatgattatcaagatcatctatcccgatatgacgacccgcacgaagttggctatccagttccgggaaaagtgaattggctaacgcctgtgccagtttaactggcataaattgttcaatatgtgtcgatgacatgtgcctgtaccttggctccgtaatcattaatcgctaaccattccgctggcaacccagagaaatccgcttctgccacacccaaccgcacagcctgatccaccaaaatacgcgccacatcaaagtgacgagagagcggatgctgagcaaggtaatcccttaacactgcacctaaatccaatgggcgctgttcttgccgatatatcaacagcgctttttcaatcatttctgccagttgttcgtttatttcactgaattcttcatattccagtgctaatggcagttcacccgtcacctcttcattacgtaacgttaattcttcgtcccgcatatcgagcaaacgttcggcgttagcaatggtaagggtccacgggttatcaaaatagtgttgaactgattgacgtaaacgctgagagaaaatacggtttttatccatatcaatcgccgtacggataaatttgtgaacgtgacgatcatagccaatccataaatcaatcgcctgctgaccccaactgataatacggtccagtttgctttgcagatcaaataccagtttatcaaccagttctgatccaccactgtccatattggcttcctgaatgcgcagcaaattagcctgtaatttatctccagccgcttccagtgtgtcctggagttcccgcaacgtacccgatgtttcggataacagttgctcacagttggcaatcgcggcttgccaatcttgattcagcaacgccgcaatatcttccttaaccgagctttgctgctcgtccattacgcgctgagacatgtcgatgctgtcgaaaatttctgcaacagaatatttcagcggcgcaaaaacattacggtgccaatgaaattcatctcccccttcttctgccgcttctgctgcccggtgcaattcactcgccaccaccgaaagttgcatcgaaagacgtaaggtagaaaattcccgctgacgaatgtaatagtcactgatacccatcccaagcggggttaagcgataaattgcattgttatcggccaattcactggtgaaacggttaagaagtttctgacgcaccatatcattgatggcattgttggcccgcaccgcgaccgattctgtggtctgctcaaaccctttgcaaacttcacgaaaggcatcaaccagctcgctttcgctcatttcgccatccaaacgctcgctgttcaacaccgcaattgccatcagaaaagccagtctttctacaggcaaggagatggaaaaatcgtttttcctggcccaagacaccagttccgggacagtctgggaatattcactcataatttgtcctttaaactgttaaagcgggcttgcgtgccatgacatgaatgtagcgccccaagctgatataaggctcctgtcggcaataacgctgttccaattccagcaacgccggaaagttttcgttctgtaattggcgattttgcaaataatcgtgaaaaacacgcacgccagttttgccggtaatcgtcatatttaattcatcaagccattgatatacctgttcaggtgccaacggattctgaggcgataatgaacgttttctgcggcgttgtatattgggcgtcgccaaatgaaaattacctaaaatagcattgcgcattactaagccattggcattgtaaaacattaaagatagagcgccacccggattaatgatattcattagcacttctattgcatatttctgatcggtaatccattccagtactgcatgaaataataccaaatctaccggctgctctatatattggctaatttcttgtaccggactttgtataaattgcatattttggctgacccctttctcttctgcggccagccttgctcgctggatcatctcttctgataaatcacacaatatcacttgatgacccaattcagctaattggcatgccatatttccctctccaccacccgcatctaaaatacgcagtggacgttgaggtaattgagccagtaattcgctaatatcctgccagacaacggcttgcctgattttacctttggttgtgccgtaaatattacgagagaatttgtctgcaatatcatcgaaattgcgatcccgcatgaaaaactgcctcactaatggaatagatctgatttatctgttgagatttcattatactgaatgctattttggcacagcattcgttgatatacccgtcatctttcaagttgcctctttgttggctgcacttactcaccccagtcacatagttcgctatgctcccggggattcgctcccttgccgccgcgatccatcttgaaatccatagggtatataaccacttttgacgacaaactgtgaaccacatggctataattcaaccaaattaaggcaaatagatgcaatttttatttaaaaagtacctcggtgcaatggtgatgcctctgccattaatattgctaatttcacttgctgctttattactactgtggtttacccgctggcaaaaaacaggaaaaacaattctaacattcagttggctcacgctacttctgctaagtttacaacctgttgccgataagctgctgttaccggtggaatcggtttatgctaacagcgaccaatctgataccagtcatatcaatccaccggttgattatatcgttgttcttggcggcggcttcacttataacccaaattgggcacccagttcaaacttacttaacaacagtttgccacgagtgacagaaggtattcgtttatatcgcctgaaccccggctctaaaatggtctttaccggtggtaaaggggcaaatgttaaaagcagtgctgaagtcgccgctatcgtagcccaatcgctcggcgtgcccgcagaagatacaattgcactgacaaagccaatggatactgagcaagaagccaatgaggttgagaaactgattggtaaccaaccctttattttagtgacttccgccaatcatatgcagcgagcaatcactttctttcaacagcatgggttgaaccccatccccggcccggctaaccaattagcgatcacttcaccattacatccttgggaaaaatatctaccctcagcttactatctgtctcattcagatcgggtatggtatgaaactttaggcaccctctggcaacgcattaagccatcaaaagatccagaacagccacaaaaatcagaacattctcagccgctaaataatcctcaagtgacttcctgaaacaaagcagcaagatagatggaaaaacgaaagcgcaatggaaataaacagcaataaataaatgatgcgctttcgttaatctaaaatatacccgtcatctttcaagttgcctctttgttggctgcactttctcaccccggtcacatcgttatctatgctcccggggattcgctcccttgccgtcgcgatccatcttgaaatccatagggtataagttcaaacaatcaatcagatttcagtaaacacttttctaattgctgccaaatcttccggcgtatcaacgcctactcccggtgcctttaatgcaatccccacatgaattttttcgccgtaccaaagtacccgcagttgttccagcatttcaatttgctccaacgggctcggctcccattgcacgtagcgacggataaaacccgcgcgataggcataaataccaatatgacgcagaaaattatcaccaatcgtttcccgtgattgaataaaacggccacgctcccaaggaatagttgccctggaaaaatagagtgcataaccctgtttatccataacgactttcacagcattagggttaaaagcttcctctgcatcatgaatctgcacggccaacgttgccattcccgctttacaacctgccaaattctctgcaacctgtttaataatctcttcgggaatcagtggttcatcaccctgaacattaacgataatttcatcatcggaaaattgatatttgttgataacctcagctaatcgttcagtaccagaatggtgattttcgttggtcagacaagcctctccaccggcagccacaacggcatcaacaacgtcgtgattatctgttgccacaatgacacgtccagcacctgaacgtttcgcccgctccataacacgaacaatcattggtttgccgtgaatatcggctaaaggtttaccgggtaaacgggttgaagcaaagcgagcaggaataataacagtgaacatgccttatttttcctcatccagaggtaattcgcgggcttcgtgctctaacaggacgggaataccatcacgtacaggaaacgcaagtcgatccaacttacaaatgagttcaaaattctctttatcgtaactgagttttccgttacatacaggacaggcaataatttcgagtaaacggtgatccatacatcctccaattatggagctttaatttaatgcagctcagaataacataagcttggtatcatcgttaactcttgttatttgatctttcgatccttttcccaatattatccactgaaaaatcaggtaagttggtgaaagtccaaaactatctcggtaggcgtaattgacacaatccctaattgccaataaatcatcaatatagataacaaacaaaaaccggagagtaaacgctgttgtcaaaaatgactcacttcgctaccctccgaattttaccaaaagtgcgttcaaaaaaacgattacctctgtttgcacatggttcaatgcttcctctttaccatttaaagaatggcaataaaatagcttgattttgatagggttttagaatgctatcacatctgccgcggttaaatcataacctttgcgaataattgaaaattccacatcctgcccttctgtgagtgacttgttttttgtattcgcaatcgcttttctattgacgaatatgtcttgtcccccatcctgtggagaaataaaaccatatcctttacgctcatcaaaccatttcactctacccatctttaattgtaatgtcataataactcccccatttgtccatctcacaataatttaatttattgtttttgatgtttttttaccctttattcaattttcgaatagaacctcatctcagtttcaataccttgaccttgaaatacatttcattcgagtagtatacccgtcatctttcaagttacctctttgttggctgcactcactcaccccagtcacatcgttatctatgctcccggggattcgctcccttgccgccgcgatgcatcttgaaatccatagggtatatatcgtttaagtaacagatacgagcggatatcctaccagaatcgtacatgtttgactcaagaatacacaatggttgtttatccaaaatggatagttttaatatcagttagcaatggcgaaaaatcaaataaatctgaaaaattactgaaattgtacgctttggcaaggagcagaaaggcaatctcccggttgactatcatcggcttactatcggctcacagaggccattttgattaaaacataatatacccgtcatctttcaagttgcctctttgttggctgccgtcgcgatgcatcttgaaatccatagggtatgtttacttactattgttattcgtctccaataacgaacaaatcttgttcagcattatctctcccttttcttggggtaaccgagcatctaccggtaaataccaccaatttggctgagcaaaattaaaacacttaaccgcatctttttctgtcatcagtaaattctggttggtgtcagccagatgacacaattgatcttctgtgtacagttgatggtcggcaaatgcatactccttttttaggtcagcacctaactgttgcaaggtggcaaagaaccgcggtggatgcccaattccagccatcgcaacagcgtgaggtatcagattcactgcacgtttttcaccgctcaccatattcacagctaactcgccagctaatgtcatggatagttcgcctggctgaggagtaccgccgttagtgataatggtattaaccctgttcaaccgcccagatagttcacgcattggacctgctggaagccaccaaccattaccaaaacggcgcacgccatcaataaccgcaatttcaaaatcccgctgcaaagcatagtgctgtaagccatcatcagtcacgatgatatccagtgacgtgtttgccagtaatgctttcactgctgcaacccgttttggcgcaacagccactggtgcgccggtacgacgatgaattaataccggttcatcaccggcttgagccgtagtgacattttcagtcaccaacagaggataactttccgctttacctccatagccgcgggaaacaacaccaacccgataaccttttttctgcaactgctccaccagccaaataaccaccggcgttttaccattaccgccagcagtgagattacccaccaccacaacaggtacaggcgctttccagggtagcctcaaccctgttttataactcaaccaccgtaagccacttatcagcccgtaaagggctgaaaaaggtaataacagcaaataaagccatgagcggcctgaccatatgcgctcaatcattgaccaaattgcatccgatgtagttgtgagtaaacaccatttcgctccagcagagagagatggtcaccccgttcaacaatatgcccatcttcaaccaccagaatttcatccgcgttttcaatggttgatagacgatgtgcaataaccagcgaggttctgtttttctgcaattcatccagtgcagcctgaattgcccgttcagattccgtgtccagcgccgaagttgcctcatcaagaatcagaaccggagaatcacgcaacaaggcacgcgcgatagcaatacgctggcgttgaccgccagaaagcagcacaccattctcaccgatcatcgtatccaagccgttatctaacttcctgatgaagtccattgcataagccatctcagcggctttctcaatctcttcacggctgtatcggttttcactggcataagcaatattattcgctaccgtgtcattaaatagatgcacattctgcgataccagtgcaacctgcccacgcaaggaagagagcttatattcccgcaagtcatgcccatccagaaaaatattaccttcgttgacatcataaaaacgggtcagcaaattcgctattgtggatttacccgagccagaacgccctactaaagcaacaatttttcccgccgggatatacatggaaatattttgcaacgccggtaattccttggttggatagcagaaagtcacattacggaactcaatatcaccgttcgcttttttaagctccagcttaccgtcatctttctcctgttccatatccagaatcgaaaacagagtctgacaggcggccatgcctcgctggaattgcgcgttaacattagtcaacgatttcaatggacgcatcaacgcaatcattgatgaaaatacgaccgtaattttacccgctgtcaatgtttccataatatccgggaaacttgcggcatacaggacaaaggccaaagcaaacgaggcaataagctgaatgatgggatcagaaattgatgaagcagacaccattttcatgccttgctgacgcatatggttactgactttattaaagcgctcagtttctacgttctgcccaccgaaaatgagcacttctttatgccctttcaacatctgctcagcactggctgtgacttgccccatgctattctgcatatttttactaatactacgaaatcgcttcgataccacacgaatcaccaatgacacgatcggcgcaatcacaatcaggatcagagataattgccagctatagtaaaacatcaaaacaaacaggccgataatggatgccccttccctgaccacggtaatcagtgcactggaagaggaggaggccacttgttcagaatcataagtgatacgggaaagcagcgtccctgtagattgttgatcaaaaaatgacaccggcatccccatcatatggctgaacagacgacgacgcatctgcattaccactttaccggagacccaagagatacaataacttgatacaaacccggatagccctcgcataatcattaaagcaatcacaatcagtggcatccatttcagtacatcactgcttgctttgccgaaaccttcatcaagtaaaggcttaagcaacgaaagcattaacgtatcaccggcagcattaaggatcagtgcaaccgcagcaactatcagcccaatcctgaacggagagacaattggccatagtcggcaaaacgtctgccaggtagaaaggtctttatcattcattattgagttaccaacacaaaaagaaatagcgggttattctactcatgatcactacgaataccaaaccactgatgataccaacgtgacataatttgttgcctatagctcatcatttcaacatgatcgccataaaaataacccgttatctgcccggataccgcggtactacgccattctgccccaattttacgatagcgtcgctgcactttaaccgaaggaagtcgccacgggctataacgtgcaacagaggccagtgcatattgtggtgagacggtatgaataaaagcggctgtagatgacgtgttactaccatgatgtggaacctgcaatacggtcgatcttaaattctctttttctattcccaatagcttatattccccttgcttttccagatctccggtcaaaagcaagctatgtttaccatcttctacccgaatgacacaagattcgtcattacctgcgcgtaatgatcttaccggcggccataatacacggaagctcaacccctgccagagccactgttcaccgcgtatacatggaagatgttgctgattgattaaagaacttctcaccgcaatacctggatatttttgttgtaagaatgctaacccaccggtatggtcaagatgatcatgactgataataatttgctctggcgttaatcgatgccaacgcaaataagggattatcaccctttcagccatactgccagtctcccaacgattagcggtatcaaaaatcagcgctttgccatctttttcaatgataaccgcaagcccgtgcccaacatccagcatagaaaatcgccacaaatagtcttcgttgcgcctcagatagcagagcattacccctaaaaaaatagtaatcagtaatttatatgattgccaccaagcgaatcgccaaataatgacaacaaaccaaccaataaacgttattaatgggggaaaacggccagtttcactccatgactgttgcaaaactggcaaagggattaaagagagggttacagagtaatcaactaattgccataataaagcgtgaataaaagaacaaaagttgctgattaatgccagcataatcaacggcacagtaataaaagagatgattggcacggcccagaagttagcaaataaagcggcaaaattgacaccatgaaataataatagctggagaggaataagcatcagcatcatacccatttgcatatataaccctcgcagccataaccatttccaaccataacgaaatggctcaattaacggtgcccaacagaaccagaacattagcgccatcacagcaaagaaagagagccagaagctgtcagaaagcaccgtcaggggatcaaataagagaatcattgcggctgtccacaatgcccactgccaagggaaacagagaatatttctataacgtaaatataaccagatcgttaaacccagtaatgcacgaatagccggaataccccaacccgatagccagacgtaatttattgccactatccaaccggcaatcagtgggaatctgtgccctatccagtgcacgggaaagaagagttgtaataatcttgccatccaccaaccaaacatactggcaaccgtaatatgcaaccctgaaatagccataaggtgagccgtacctgtttgttgtaataataaattatcctccttacttaaccactgacgttctccgaatgctaatgccatcgcaatgccactatgcttcaattcacgaatatccggtgcaatatgactgaccaatcgctgacgtaaattacatttcccatcaattaattcagcgtgaatgacttttcctgttaaaggtcggcggatagctaatgccctacgctggctatcatatccaccttgatttagctgactatgaactggccgtaatttcattttcagccgccattcttgaccagcacacagagattcaggcgaaatatcccaataagcggaaacatacagtggcggaaaaataactttgttttcattctcaataatacgcaggataactctgccattctcttcattatctaatgataaactttcaataataacccgtgataaatgcgctttttcactaaaatagattatctgttcgagcagatgatttccttgccagcacccaataagaaatgccagtaacgaaattgaaaccatccgacaaagacaaaatggcaagaataagtagaatagagccagtaatagcaatgccatcatctgccatttctgtggtaactcaggcagaaaaaacaagggtacaataccgacaataatagctattgcagcctgattcacgctaataattggtataggttgtttccaatttattgttatcttatttatcacaactgaaaaccacatccttattcatccttacccttttatttttccagcagagtattgcttattttttacaaagcagccagaagcacaagaaaaatcatcaaacaccttcgcaaattaatttcaggctaataatcatttcacaaatatatgcgaacagcttcgcaaatacagaaatttccacctgctaattacccaacaaatgttatattggttgaaaatgtaacattgcgatactgatatcaaataaaatatctcgtaaggttttgtccgtatcttcattacagacataaatataccctatggatttcaagatggatcgcgacggcaagggagcgaatccccgggagcatagataacgatgtaaccggggtgagtgagtgcagccaacaaagaggcaacttgaaagataacgggtataaacattctaagagcctatctcaataggcgtaattgttgcaggccattcttatcaatgaacagtgaacacggacagcgcggaaaaaccggagcgtacacgtagtacgtgaggattttgagcactgcccaggttcgctctttatggcaaagaagggcaaataaaatagccctattgggataggcagtaagtcattatgaacttacgagaagttacattatccacttattattataattaaatattaaattcatttttgaaattattaaccatgcctatgaattaatagaacaatcaatctaaccatatgtaaaaaaataattattatcagacattacctcagttgttgagcactaaattagtgaaactacttaaatgactgtccactttttgttttgtgattaagatcgcattgattaaatttaaataatattaaattaatatttccattctatttttatatggaaagtaatcaaaaaatcatgttaaatacaataaggtggtttttatgaaaaacaaaataattgtatctgactctctgcaagaacatcatcttactaaattatttaatgatgaagtgttagcaatccatataaagaaatatgttgatatctctcttgcagacaagctctctgattttttcctctctcacgaaaatctagaatgtcatcctcatgatttgaaaaaaggagatgaagttgttttagttgattatggtgttgatagaattggcccgtcttacaacacaacttttggcaaatccaaagatagcgatagctataaaaaatattttgaaaatgcgttacctgccatcagaaacgtcagaaatttctgtgctcccatgttagcccctttcgataaatttcgtttagaactggatgaagtatggtctgccggggctagcattgccaactttgaaggtaaaaagatgcatgcggggattgccagagtgatgaacagaccagaacgttctttcatggttgaaaaacaaccccatttcgatggtcttcaacaacaatctgtcaatttgttggggcaattctcagtgaatatctatataaaaatgcctgcaactggaggagagctggaactgtgggatgttcctgaaatccctatcaccgagttaattgaagataatgcagaaaatgattggcgaggcacgcttccgccatctgtcctcattaaaccagagcaaggagatttaattataataaacaccaggaaaccccatgctattcgtagttttcccgaggggggcagaatatcattacaaagcttcattggattatcactaaataaacatctcatgttatggaattaattatatggttgatgtaatcagtacattaggaacattttttcttttaggattgggagctgcggctcccgttggccctataaatatagaaattatgcgtagacacttgaatatcagttgtcttcacgcagtcgtttttggtttaggtgcttgttttgccgatataatttatttattacttttaggttttggtatattgcaatttttttccaatactatttttatgcctattttggggtttttaggcgcattaatggtcatttggtttggtattaccagcttcataaataagaaaaatgaggaaaatatcaatatcatatccaaaccctatcataggcaattttttgatggtgtattgttgacattattaaatccatacaatgttattttttggctgtctgtcagcgcacaactcaacaatattgcatcaggtaaatatagtttagctattggtgcagcagggacaattattggcgttattgtttgggttgcctttattaatactgtgatattcttctccaggaaaatgctcagtcaccgtgttatcaaatttattaattacaccagcggcgtcgttcttattatgcttggaatctatttcttttcatattcaataacactatttaatctgaaattttcttaagtcaggaaatgctatgcctgaggatccaataacgtttttaatcaaacgaaatttcatggagatccttaggcataattaaaataacttctctgttttcattacttattgttaattaaacgagaaagactatataccctatggatttcaagatggatcgcgacggcaagggagtgaatccccgggagcatagataacgatgtgaccggggtgaaagagtgcagccaacaaagaggcaacttgaaagataacgggtacatcaagctgtgggacatcttatccgtactaaacagaggataccggagcagtaacgattctcgacacgcgcattaaattcaaaactacggcaaagatattctcaattctctgcccccgtttcgtcgtgttatctgataagacatttacgttattaaaaaacatgatcaaacaaacctagttgaagttgctgtgactttggtatatattttatgcaagattttttaaaattaattcccttgtaggaagcacttcaagatgaatgcacctgatattaagaaagcacaacatgttgcatacgctcaacgtgtaaaagagcagaagagtagtcatgcagctccacagcctgttatacaaagacctgctttaagtgtgccatcaggtagtttcgttgctggtatggctccaagcttctgattcttccccctataccgcacatgatataatgagccagtgtttataatatttggttctttttttatgactgttgaacacataccgccttctgaacaaatttatttactcaatcaagagctagtccaaaacgctgatagtttagcagggccagcaatcactgttggtggtcaagctgtgcgctactgggtaaatacataccttcataaatactcgaaagataatttacctaatgaagttttcataacttctgttgatgttgattatgtaacaaaacggaacaatgttgaaaacatcgccagagcattcaacgttgaacctcactataacaatccacttgatttcccatctattgcaatatgccttctgaccgataaggacacaaagacaattaaagagcatgaaggccggttgttctctaaccctgataacaatgatgaatgtaaccttgttgatatcattgaccggccagcaggttttgaacacgacgatttatctggcgacaaactatacttgaatacagaacgttttatgattaatgcagcgccaggctctcatgagctcgttcgtattttgaatcctatcgcttgtattcgatctcgcctcgccaacattgtgaataaagtcaaagacgatattgaggtcgagaaagagcgcatcagaagcctgatgatccctacttattactttctgttagaaaaacttgagcatgaagattttcgaacagccagaaaatatgttgaagactttggttatctgctacaagaacgatcacggcgtcattgtcttgtaaaatatgggattgaactccataaagttcttgaatcacttcaagttaatctctctgaacacagggatgattacgagttgccggatatgtttcttgatgaagagttaaggcgaatggctgatcatcataagaatcaatatattagactaagagctcaattacagttagaccaataactttataagaacgaacgccttattgggcgtttcagaccgctatttttaaagcccggtttatctcttctggctcgccattcttttatacccgttatccttcaagttgcctctttgctggctgcactctctcaccccggtcacatagttcgctatgctcccggggattcgctcccttgccgccgcgatgcatcttgaaatccatagggtatataactttaagaacaccttctgggttatcttcaatgccttcctcaggataaaatattaaatcaccaccagaggcggtattctgatattttatccaatgtgccagccaacttacgccccatgtcaaacatatctgttacaccaccgacaatgatgtaagtgccgggatgtttaccacaagtaaccttatctccttcacgagccgttgctcgcccatcaaatgtcatggtgtggtcaccagtaataatctggccgccacacgttgttttatcaccaaccagcaggaaataccctattgccatctattcacttctccattgatttatagcatgaagagtggttctaactgaaatcatcatgttttcaccacttatggattaataaatattcaatgatgcaatggatttcacctaaaaatatataggaatattccgaaatttatcgaaattaagtggcttgatgccggtattaccttatatttttaacaacttttatacatttatttatcaaaagcgaatatcacgaataaatttaaaaccaatgacgatattaattttgcatacgagtgatttctggggacacagcgtcagattgacaggattatggggaaggttttctaagtataaaagttagctctttttatatgagccttgattagatcaaaaaagcgctgaccaaaaggccagcactttgttatgaatctaaaacagtatcgaaacactgtttagaataagcaataacttgttatcttcaaacttaatcgtagatattcacgcgatcacgcaactctttcccaggtttaaaatggggaacgtatttaccttccagctccactttatcaccggttttagggttacgacctacgcgcggagcacggtagtgaagagaaaaactgccgaatccgcgcacctctatacgttcaccatctgccaatgttattgccatatggtcgagtatttctttcactgcatcttcaacggttttggccgaaatatgagattgctggccagcaagtctttcaattaattcagacttggtcatgagtacctccctaaactaccgcacttggataacacttacgtgttatccaccgttattcacttgaattattcgcctttcgctgctttgaaagcttcagccatcgcattgtttgcaaagtttgcgtcttcttgtttgttcacagaagcgatagcgtctttttcgtcagcttcgtctttagcgcgaacagacaagttgataacgcggtttttgcgatcaactccagtatatttagcttcaactgcatcacccacgttcagaaccagcgttgcatcttcaacacggtcacgagaagcttctgatgcacgcaggtaaccttcaacgccgtcagccagttctactgtcgcacctttagcatcaactgcggtaactttaccagtaacaatagcacctttcttgttcacggacaggtagttattgaatggatcttctgccagttgtttaatgcccagagagatacgctcacgctctgcatctacttgcagaacaacagccgcgatttcatcgccttttttgtattcacgaacggcttcttctccagcaacgttccaggagatgtcagacaggtgaaccaggccatcaatgccgccatccagaccaatgaagataccgaagtcagtaatagacttgatcttaccttcaacgcggtcatttttgttgtgagtctcagcaaataactgccaagggttagctttacactgtttcagacccagggagatacgacgacgttcttcgtcgatatccagaaccataacttccacaacgtcaccaacgttaaccactttggatgggtggatgtttttgttggtccagtccatttctgaaacgtgtaccagaccttcaacgccttcttcgatctctacgaagcagccgtaatcagtcaggttagttacgcgaccagtcagtttagtgccttctggataacgcttagcgattgctacccaaggatcttcgcccagttgtttcaggcccaaagatacacgggtacgctcacggtcaaatttcagtaccttaactgcgatttcatcgcccacattgacgatttcacttggatgtttaacacgtttccaagccatatcagtaatgtgcagcaagccatcaacgccacccagatcaacaaatgcgccgtagtcagtcaggttcttaacgatacctttaacttccataccttcttgcaggttttccagcagttgatcacgttctgcactgttttcagattcaataacagcacgacgagaaaccacgacgttgttgcgtttctgatccagtttgatgactttaaactcaagctctttaccttccaggtgagttgtatcacgaactggacgaacatcaaccagagaaccaggcaggaatgcgcggataccgttcagttcaacagtaaaaccgccttttactttaccgttgatgatgccggtaactgtttctgcgtcttcgtaagctttttccagcatcagccacgcttcatggcgttttgctttctcacgagacagaacagtttcaccaaaaccatcttcaacagcgtctaacgcaacatcaatttcatcaccgacctggatttccagctcaccctgaacatttttaaactgttctacaggaattgcggattctgatttcagacctgcatcaaccaatacaacgtctttatcaatagcaacaacgatgccgcgaacgatagcacctggacgagtttcaatagatagcagggattcttcaaagagttgagcaaaagattctgtcatgttaatgatcttcaagattttaatttaacgtccatttagcttcccgccgaatggggttgttttacatgccctgctactatttccctgtaacaaggttgtttggtttgcgaaaaaatttgatacccgcgtacctaatttttagtacatcgtcatcaattataagctaaaaacttaaaatcgctcaggtaattgagagaatttttttcgcataatttagcgccttgtcgatgacttcttcgatagacatactggttgaatccaatattaatgcatctttagccggcgctaacggcgcaactgcccggttacgatcgcggtaatcacgctcctgtatctcggacaaaagacattcaaagttaacactaaagcctttttcctgcaactgtagcatacgtctgcgtgcacgttcttctgcgctggcatcaagaaatattttcaccggagcatcagaaaacaccacggttcccatatcacggccatcggcaatcaagcccggtgcaacccgaaaagcacgctgacgccgtaacaaggcttcacgaacccgtgggaaagcagccgcctgcgaggcagtattgccgaccgcctcggtccggatctcattactgacatcctcgccctcaagcatcacactgagcttcccttttctagggacaaaacgcacatcaagattagcagccagaggaactaacgcgtcttcagactggatatccacctgatgatgaatcgcggccagtgccaacactcgataaatagcacctgaatcaagcagttgccagcctaaaacctctgccagtgcctggcataatgttcctttacctgcaccgcttggcccatcaacagttattactggggctatcgccaccattattgttctcctttagcatggcaagttaacacgtcaccagatgctgaatatttactcgataaaataatcaatatctgccgttgattatacgcactcacagagtgaacgaaataagcgcatgccatgtagatatacccgttatctttcaagttgcttctttgttggctgcactcgttcaccccggtcacatcgttatctatgctaccggggattcactcccttgccgtcgcgatccatcttgaaatccattgggtatagattttgatcaaagaaatacgctttattaaatcataataatcgataattatgactttcgctggcttaatctctccaattgattgaaataatcaggaaaggtctttgctgtacaacctggatcgagaatggtaaccggtgtatcggacaacgccaccaacgagaaacacatcgccattcgatgatcattataggtgccaatttcagcaggtaataatcttggtggcggtgtgatgcgaatgtaatcaaccccctcttccacctctgcaccgactttacgcaattcagttgccatcgcatgcagccgatccgtctcttttacccgccagttgtatatattgcgaatgacggtctcccctgccgcaaacaacgcagtggttgcaatggtcatagcagcatcagggatctcattcatatccatatcaatgccagtgagagtgccacgttcgcattcaacaaagtcatcaccccaacgaattttcgcccccattttctccagcacattggcaaatttggtatccccttgcaggctatttttaccaattccagtcacacgcacagtgccacctttaattgctgcggccgccagaaaataggaagcagaagaggcatcaccttcaaccaaatagtgccccggagaaacgtattgctgtcggcctttaatgtggaaaatctgatattgatcgtgatttatggtaataccaaaacttttcatcaatgccagagtgatatcaatatagggtttggaaaccaattccccctgaatatgaatctcagaatcattttccgccaatggcgcagccatcagcaatgcggtcagaaattggctggaaacccggccatctaccatcactttgccgccaacaaaaccccctttgacgtgtaacggcggataattttcctgctccagataatcaatttctgcccccccctgacgcaaagcatccaccagatgaccaatcggacgctctttcatccgaggttcgccggtaagaacgacgtcatttttgcccaagcataacgcggcggttagggggcgcattgccgtaccggcattacccagaaacagttctatcgggccttgatgggtaatcaatccaccaataccgtcaacttcacaacaggtacgatcatcagataaacgataactgatacccaacgcagccaaagcattgagcatatgacgaatatcatcactgtccaacaagttagttaaacaagtagcacctttggcgaaagccgccagtaatagcgcacggttagaaacactttttgaccctggcaggttaatagttccgttaatgtaggaaataggttgtagcatcagggattgcataaataacgggctctccggttctcgattacattgttttaattatatacccgtcatctttcaagttgcttctttgttggctgcacttactcaccccggtcacatcgttctctatgctcccggggattcgctcccttgccgtcgcgatccatcttgaaatccattgggtataagtgagtcatttttacgtttgaggaaatattttttacttgaatgagccgggaaccattgttcccggtaatgattgacaaattagccgttacggcgctcaaaatcagccataaaatcaactaaagcctgaaccccttctatcgacatcgcattataaatagaagcacgcataccaccggaaacccggtgccctttcagtgcctgcaacccttgtgcatcagcctccgccagaaacttgctatccagtgaggcatccaccatctggaacggtacattcatcagagaacgattttcaggggcaacctggttgcgataaaaatcactcttatcaatcacatcataaagcagttcagccttagctcggttgcgctttgccatctcttgtactccaccttgctctttcagccatttgaagaccaaaccagagagataccaggcaaacgttggcggtgtgttgaacatggagtcattctctgccaaaacagcatagtcgaaaatggacggggtttctttacgggctttgcccaataaatcttcacgcacaataactaatgtgataccagcaggaccaatatttttctgcgctcccgcataaatcataccgtaacggctaacatccaatggcccggaaagaatagaggaagagtagtcagcaataataattttattatcgctaaaatccggctgttcatgaatagcgataccatcaatagtttcattcgggcaataatgaacataagccgcatcatcactcaatgaccattcacgcattggtttaacgcttttcaagccattaatttcggttttgatattaatcacattcggtgtgcagtattttttggcttctttaactgcacatgccgcccaataaccgccatcaatataatcggctttaaccttgtcacccaataggttcattggaatagcggcaaattgaccgcgggcaccaccatgacagaacaatactttatagttttcaggcactgataataaatcccgcagatcattttcagcttcctttgccactgcgataaattccttaccccggtgactgatctccataattgaagtcccaataccatgccagttacagagctcctgttcagctctacgcaatacttcaacgggtaacatagcgggacctgaactgaaattatatacctgattcatttacctcaccttattctgacgaaataacaatgattgataacaataaataatctgatataccggttgtaccattcccatttcattgctgcaatggttattcaaacgttgaacaaaactatcgcaaaaatagccaataaacttattcattcagcgctattacaggtgaaccgcttattttttaccttttttatctacagcgatgagaggaaggaataatgtgaatggcgaatcgggtaaagcaataaaaccatgatgtcggtaaaattgcactgcattatcatcttttgcgtcaacaagcagcgcataagatgcaatttcggcacgaatggtcctctcaatagcatcagctagcaatgctccaccgagtccctgatttctaaatgcctgatcaacggccaacctccccatccgtactgccggcactgttgggtatcgtggcaatttcttaatagtagctgtcgggaggttggccaactggataccggcagcagccagagtataatatcccgctacacggtgatcatgaagcgcaacaaaacaagctgctacgcggcacctaacatcctgaccaacctgtctctgaaagtaaccatctagaaattctgaaccactgtagaacgaatcacgatcgtgttcttcgttgagttgcataacatcaaacatcgtggaactcattctgatcgtaacaaagagcggtgccgtgcaaatgcacgttcaagcgccggagtcgattccggtggattcagcaatgcctgcgcaaaacattgctgatcggccagagacaaacggagtacttctgactgctcaattgcgcgttgcgccgcatcctgtgcagcagacacaacaaaatcagtcatagtacgtccttgaatttcagcggcccgtttaatcagggcatgtagttcaggattcatacgcgcctcaaaacgcgcggtggaagtagccataatagacctcgactaaaattatccggcaaatttccgtacaaataatatcttagctactttttgagcagaatgctactttcaactgctagttttaatcagcgcgtttcctcgctatagcgcgcgaaactccgtcacccgcacgccctatttgttatctctgaatcacaaatcaatatttcacaaacatctcgtgaattttcaccggattacgtgtttcagtcagagctaattgtaaaagtactctggccttttgcggattcaaacgttcagaagcgacaaagccatgtttgctatcgtctacttccgcatcctgagtaacatatcccaccggtacacggcttgatctgacgaccacaaccccatctttagccgccaaggccagagtatcgaaaatcgccttgtacatattaccgttgcccacaccagcgctgacaatgccttggtaaccatctttcaacagagctttcgccggcagatcagacgcattggcatagttataaacaatacctactttcggtagcttatcgagtttactgacatcaaaaatagccttattggctctcggcttcgcgtcagcataataattgactttgccattatgaacaaagccctcagcacccgcattaactggctggaacgcctgaacttcggtggtgctcattttcaccacggtgcgcccactgataaccgcatcattcattgccatcaacacaccgcgtttggctgatgctgtatcaccggcaacgaccacagcgttatacagatttaacgggccatcagcaccaagcgctgtagatggacgcatcgctccaaccatgacaatgggtttctggcagtgggtagtcagatcgaggaagtaagcggtttcttccatcgtgtcagtaccatgggtgataacaaaaccatcggtcttgtcacaatcagcgttgattcttttcgctagcgttaaccacacctgatcattcatatcttgcgagccaatactcaccacctgttcaccttttaggttggcgatatttttgatctcaggaacagcattgactaattcatcaatggcaacccttccagcaacatagttggattggattgcagacttcccgccacccgcgatcgtccctcccgtcgccaaaagtgtaatatttggtaaagcaaaagcagaaccactaattaatgccaataaactggctaaagctgtgtgtttcatctttttcatgcttcttccttaataaaaaatatcctgttaaattatggatgatgataacaataaatctgtgatacataccagactttagctactgaaaaaaaactcgtatgatgagcgccccataacgagcactcataagtgaataccatgatgcaaacctttattcccggcaaagatgccgcactggaagattcaatcaaccgttttcagcaaaaactgcaacatcttggttttaatatcgaagaagcctcatggctgaatccggttcctcatgtctggtcggttcatatccgtgaccgcgattgtcctctctgttttaccaacggcaaaggtgctagcaaaaaagccgctttagcttctgctttaggggagtattttgaacgcctgtcaaccaactatttttttgctgacttctatttaggcgaagctatcgctaacggtgattttgtccattatccgaatgaaaaatggtttgctttaccggacgataattctttgccagcaggcattctggatgaccggttacaccaattttataatcctgaaaatgagttatgcgccagtcagttagtcgatttgcagtcaggtaatgaagagcgtggtatctgctcactgccgtttactcgtcaatctgatcatcataccgtctatattccgatgaatattattggcaatctttatgtttccaatggtatgtcagccggcaacacgatgaatgaagccagagttcagggattatctgaagtttttgaacgctatgtgaaaaatcgtattatcgccgaaggcatcagcctgccagaaattccccaggaagtgatgaatcgttatcccgacgttgttgccgcagtcagcaaattacaagatgaaggtttcccactctattgttatgacgcctctctcagtgggcagttcccggttatttgcgtcgtgctgtttaatcctaataacgggacttgtttcgcctcttttggtgcacatcctgaatttggtgtagcactggaacgtactgtgaccgaattattacaaggacgcagtttgaaagatctggatgtgttcaatgcgccgacttttgataatgaagaagtggcagaacatactaatctggaaactcactttatcgattcgagcggtttaatcagttgggatttattcaaacaagatgctgattatgcgttcgctgactggagtttcagcggcacgaccgaagaagaattcgccactttgatggctatcttcaaacaattggatgccgaagtttatattgctgactacgagcaccttggtgtttatgcctgccgtattttggttccgggaatgtctgatatttatcctgtggaagatttacatcttgctaataacacgatgggaatccatctgcgggaagctttattagcattaccggatagccagtggcaagccgaagaatatctggcgctgattgagcaattagatgaagaaggtttggacgattttacccgtatccgtgagttacttggcattgcggtaggtaaagataatggctggagcaatttacgaattggtgagctgaaatccatgttggcgctggcgggcggtgatttggagcaggctttaatttgggtagaatggacccaagattttaacacctcaatctttacggccgaacgcgctaattattatcgctgtttgcaaacactgcttttacttgctctggaagcgaataaagcgcctgcacaatattatcaagcattcataaaaatgtatgggcaagatgctgttgaagcagcatcagcagctatttctggtgaacactgtttttatggtctgtggtcagtcgatgcagatttaaaatcactgcccgctcatcaggctttattggctgcttatgagaagctgcaaaaagcaaaatgcgatttctggaacacaaaataaaattgtagaaaagacaattcataattaaaagtaaaatccaggttaaattaaatttatttgcaacaacaaataaacaacaatttgacctgtaattttacttactaaacgtcctactaatgggttaaataaaaaaatattataatttttaaaatttttttattttattaaaatcaataggttaaattgaatttaaaccgttttcactccccaaaacagagtccactcttagggaattatgatctatatcaaattctccccttcacgcctttgttactatcattacgtaccgtaacttattaatgataaagagaatgttggtatgaaagctgacaccccctttaacctattaccccctgcgataatgacacaaatcgccaatgacattggtgtttataaaacgactaaacctgttgccattacctatctgtcagcaataactgccgggatttttatttccattgcattcgtcttttatattaccgcgactacaggaaccacatctgtcccttatgggctagctaaattagttggcggcatctgtttttcccttggattaatgttagtcgtcgtttgcggagcagatttatttacttccactgtgttaacgattatttccaaagccaccgggcgtataacctggtatcaaatgatgataaactggattaacgtttattttggtaatttgattggcgcactatttttcgtcgccattatctggtttgctggtcaataccatgttgccgatggattatggggcctgaatgtcttgcaaacagcaaaccataaaatacaccactcttttattgaagcgctatttttaggcattctcgccaatttaatggtttgtctcgctgtttggatgagttatgccggacgtagtttaatggacaaaatattcgtcatgattttgccagtaagtatgttcgttgccagcggctttgagcacagtattgcgaatatgtttttaatcccacttagcattgctattaagcatttcgcaccaactgaattttggattaacgtgggagcaacacctgaacaattttctcaactcaccatttcacactttattactaacaatttaattccagtcactattggtaacattatcggtggcgctattttggtgggtttaacttactggtcaatttatctgcgtagtgagcaaaaacattaattagctctctcgcctgatttcttaaaagttcgattattacaaaggtagaagtatcatgactgaattaaataaaaagttctctgtagcatggcaagattttaaccaaggtgattggcaaagcgaagtcaatgttcgtgacttcatccaaaaaaactatacgccatatgagggtgatgaatctttcctgtcaggtgcgacaaaagcgaccgataccttatgggaaaaagtcatggaaggtatcaaaatcgaaaaccgcactcatgcgccagttgattttgatactgatgttgctgctactattacctcccacgacgcaggttatatcgaaaaagatctggaaaccattgttggcctgcaaacggaagctccattaaaacgtgccctaatcccatttggtggcatcaaaatggtggaaggctcatgtaaagtttatggtcgtgaactcgatcctaaattgaaacagattttcactgaataccgcaaaacgcataatcaaggcgttttcgatgtttacacaccagatattcttaaatgccgaaaatctggtgttctgacaggtctgcctgatgcctatggccgtggtcgcattattggtgactaccgtcgtgttgcagtatacggtatcgatttcttgcgtgatgataaattagctcagttcaattcattgcaggaaaagctggaaaacggtgaagatctggcaatgactattcaattgcgtgaagaaatcgctgaacagcaccgcgctctgagccaaattaaagagatggcggctaaatacggctatgatatctctggccccgccactgacgctaaggaagcaatacagtggacttatttcgcttatctggcggcggttaagtctcaaaatggtgccgcaatgtccttcggtcgcgtttccagtttcctggatatctacatcgaacgtgacctgaaagcgggtaagctgacagaagttgaagctcaggaattaattgaccatctggtgatgaaattacgtatggttcgtttcctgcgtacccctgaatatgatgaactattttccggtgacccaatctgggcaacagaatcgctggcaggtatggggatagatggtcgcacgctggtgactaaaaatagtttccgtttcctgaacaccctatacacaatgggcccatcaccagaacccaatatgaccatcctatggtccgaaaaactgccgacaaatttcaaaaaattcgcggcaaaagtttccatcgatacctcatctttgcaatatgagaacgatgatttgatgcgccctgacttcaacaacgatgattacgctattgcttgttgcgtcagccctatgattgtgggtaaacagatgcaattcttcggtgctcgcgcaaatctggctaaaacgatgctgtacgccattaacggcggtgtagatgaaaagctgaaaatgcaggttggcccgaaagaagagccaataaaagatgaagtgctggattacgacaaggttatggcccgcatggatcactttatggattggctggcaaaacagtatgttactgcactaaacatcattcactatatgcatgataagtatagctatgaagcggcactgatggcactgcacgaccgtgatgtttaccgtactatggcctgtggcattgccggtctgtctgtcgctgctgactcattgtctgccatcaagtatgccaaagtgacaccgatccgtgatgaggatggtttagcggttgatttcaagattgaaggtgaatatccacaattcggtaacaacgactcgcgtgttgatgatatcgcctgtgatttggttgaacgtttcatgaaaaaaatccagaaactgaatacttatcgcaacgcggtaccgacacaatccgttctgaccatcacttctaacgtggtatatggtaagaaaaccggtaacacccctgacggacgtcgtgctggcgcaccatttggacccggtgccaatccaatgcatggtcgcgatcaaaaaggtgccgtcgcctcattgacttctgtggctaaattgcccttcgcctatgcaaaagatggtatctcttataccttctctatcgtaccaaacgcgttaggcaaagatgatgaaacacgcaaaactaatctggctggtttgctggatggttatttccaccatgaagcagaaattgaaggtggtcagcatttgaacgtcaatgtgatgaaccgtgacatgctgcttgatgccatggaagaccctgaaaaatatcctcaactcactatccgggtatcaggttatgccgtacgtttcaactcactgactaaagagcaacaacaggatgtaattacccgtactttcacccaatctatgtaataatttgttagcacaggccctgaattttagggcctctattcgtttatcctgccagttttggagtaaacctgttatgtccgtacttggtcgtatccactctttcgaatcctgtggcaccgttgatggccccggtatccggtttattgttttctttcaaggttgcctgatgcgttgtctctattgccataaccgcgacacatgggatacccacggcggcaaagacgtgaccgttgaagaattgataaaagaagcaacagcctatcgtcattttatgaacgcatccggtggcggggttactgcatcgggtggtgaagccgttcttcaagctgaatttgtacgtgactggttccgagcctgtcatgccgaaggtattcatacttgtcttgacactaatggatttgtccgccgctatggtccagttattgatgaattgatggatgcaacagatctcgttatgctcgatttgaagcaacttaatgatgagattcatcagaaattagtcggtgtctccaatcatcgcaccttggagtttgcccgctatctggctaaacgtaaccagaaaacttggatccgttacgttgtagttcccggctggtccgatgataatgagtccgctcataagctaggtgaatttaccaacgatatgaaaaatattgaaaaaatagaacttctgccttatcacgaactgggtaaacataaatggacgactatgggggaaaaatatcagttggaaggtgtaaaaccgcctgcaaaagagactatggagagagtgaaaaacattttggaaagttatggtcataaggttatctattaattaaattatttaacttttatctctgaaataaagtcgcaataacaccttcagaatatcaatggcttttaatcattgcattatgtggcaagttccccggtactagaatttttaagctttgataccttacaacaaaggggttcacgaactctgttcggatgccaaaatcagtaataaaaggtcacatcaggcacatgaacattgaggttttgacgaaacagaacgagttatttgtttccgcaaacaactcacttaatcgcgttccccatgctcttatggcccctataaagctgcttccgtctgataggtttcagcttcgccgggcaaacgtaaaaatcccttgtataaccatcatcctgaataagaacaaaaatgccgaacttgaatatcggcattttgctgtgaaagaggagattaatttaatgctttaacgcttcgattttatcccggctcaggccggtactggtgacaataatgtccaaactcacgccatgccgtaataaggcacaagccgtttccagtttaccttcctctcggccttcttctcgaccttcctctcgacctagctcaataccttgcttgatacctcgctcaagccctttttgttcaagctgttctgcaatagtcatcaacatcgtttcatgctccggagattgttcaatcagttgatggacaaaatgtgagagatccagcgtatgtccattcagtaaaatatagagtaacaccacattgagctgctcggttgtattataccctgcattcaagagttccaccaattggaggagccattcctgcatatcccgacagcgaatatgtttttgcaccagctccatcagggcaacccctttatgcgtcaggatctcttcatcgctgagcacactgacgtccaccaacggaaacgcctgacggtataagcgagccgcctgttcggggagcgtgaaacaatccagccaccggtttgagtaaggatacggccgaatctcaccatgataaaacagcagaggtgccaccaacgggagttcagtatggccttttttcaggtgagccgccatggctaacatggcataatacatcagccgccaggccattaacgggtcaggggtggactgatgttcaatcaggcaatagatatagccctgtccccgggccgtttcgaccgagtacaacacatcactgtgcagttgacgtaaatgctcatccacaaaactgccgggctccagtttcaatgtggctaaatcacacaacaactggatttcttcgggcaaataaagggatagaaactctctggccgtttcaggctgcgttaaaaaatatttaaataatccgtcatggtgaggccgtttttctttctttgccacaatctgtttctctgtattattagttagtcattaccatttatagtatttctaccaagctacaaaaaacatcttcccatattttctcaggcaaatctttaccgaatgcattaatagaagagcctaaagaaccaaatatcagaaaagaaaaaaagagaaaacattatatttacaacaaccattcaatgaaagccatttatttaaatgagtttttaacttgtattcgaataataataatcccgttatcaaaatatcgattatttatatttctgttaatcttggactcacataataattgccactctcattagaagaaaaatttacaatggattttgctaaaaccctacgtcttaaaacacgctaaaaaagtatccttacaagtgaaaacaaaccttgacttataattttaattgtatatttttagttcataacactattttaagctaaattccaaacaacaggttactcattatggatgctttagatgaattttacgaaagaaacccttccgccagaggatacttggataacagtaccaaacataccgtccaatacttcattttctgacatcgctattcccaaaagcggtgacgatttatcaacaggttttttaaatgttatgggatggtgcttgacatgctgatcccaagttaaagaatgattgagattatatatgaatatctggtctgtatgatctaattggcctttatttcctattgaatctatcgacgaacaacctgccgatatcaagccctgcttatagccctttaaagttaaatagattaacggcctatcccaatagggctattttatttgcccttctttgccataaagagcgaacctaggcagtgctcaaaatcctcacgtactacgtgtacgctccggtttttccgcgctgtccgtgttcactgtccattgataagaatggcctacaacaattacgcctattgggataggcactaagcctgacatatatgctccttctcagcgttaaaatgccaactactaactattagtagtgcttttcattctacagaaaaaaacactcaatggaattaaaattattccgattacatggggtagaagttaattaaattcagccgtcagttaacattgaaacactttattacaattattatcaatttgataaaattaaaaacacttagcaatactttgtaggaggcggattcgactaataagtgcaatttttcagaagggcggtcagttgctatagtaggcatctttctcgccaaaggaaaatgcactatggcctatacacaactgaccgaaacagaaagataccagatttccagtttaagagaagcgggtttttcacagctttttattgcgaagtcacttaagcgaagcccatcgaccatcagcagagaattgaagagaaatcaagaagtccagacatactgccctgaacaggctcatttgaaggtattggcgcgtcgtcattttgctaaaaaggccgtgaaaataacgccggaagtaaaaagatggataaaacggttaatttggaaagatttaagccctgaacaggtggctgattatttgaagcaacataaagggatatctttgcatcatgagacgatttatagactgatttatcaagataaaagagaggggggtgatttatggcaacatctgcgaatagccagaaaaccctatcgcaaacgctatggtcgctatgaaagaagaggtaaaattaaaaatcgggtcagtattgatgaacgcccggaaattgttgataaaaaagaacgtattggggactgggaaggagatacgataatagggaaagataaaaaaagtgtcttattaacattggttgaccgcaagacgctgtatacaattatcgttaaacttgatagcaagcaggcatcagaagtcgcgaaagcagcagtgaaagtattatacccgttaaaacaaaaggttaagaccatcacgttcgataacggtttggagttcgcagatcatgaaatcatcggtgaagaattagaaacccaaatttactttgctcacccttattcgccttgggaaagagggatcaatgagaatatcaatgggttaatcagacaatactttccaaagggaaccaattttaatgaaatctctgatcaggaaataaattttgtggtaaaccgattaaataatcgtcctcgaaaaacacggggtgggaaaacaccgaatgaattatttaaaggaatacgaacatgtttacttccagattaacgatgttgcacttattatgtgaatccaagggaaattatttatcttttctggtcgttacttatatttaatgcttgttgaacaatagaattaatataatatatttacctaatctctcaatctgactgtatcttacgagataaagtcaagccggtgactttaaatatcatgcatcaacacattaattggaaaattatatggataatcaaaacttaaattttaactccaacgctatgactaatgaccatcaggaagtatttattcctaatggtcagtccctcagtagcacagagggtgtgaaatggattggtcaagcatggcaacttgtcaagaacaagtggggtatgtggatactactctatattatctataccctatggatttcaagatgcatcgcgacggcaagggagcgaatccccgggagcataggtaactatgtgaccggggtgagtgagtgcagccaacaaagaggcaatttgaaagataacgggtatattctatatgtatagctggtttcatgcttattccctttattggaatatttaccttgtttctgaacccagtatttatcggcggtataattgccgtgtgcgaaaaacagaggactagcggagaattcgagctaagtctgttgttcaacggatttcagaaaaactttgcatcactgctcggcattggtgctttaacgcttggtattatactcctcggtgttatcgcaatgtttattgccggtggtagtgccgtaattcatattctattagccgctcaacatggtgaaatttcagtcgaaatgcttcaaaatagcctgttctcattacttcttggtctctttattctgatggttttctcaattgtgaatgccgcattgacctggtttgcaccagcgctaattgttatccataatttaaaatttggggccgccatatcaatgagcctggccgcagtgaaaaaaaatctattacctggtttattattctttatcacctccgcgctcattttcataatttcggtaatgacttttggtttaagttttctaatctctataccagtacttttagttagttattattcttcctaccgcagcatttttatcagtaaggagaaatcatccacattttaatcgactaaaaaatacttaggttgacaagcctcgctattttaaacgaggtttgtttttttatgatgggaaaactcctgccattttcccgatttaactcgtttgattgctattagaggctacatttttaccgcagagcgtcaaccacttaaggatcgtttaaaacgagtaaaaaaatccgaggttatactaatattagaagaaaaaacatcaggaaaaacaaggtctaaattttttaacaaagtggaaaaacaacaaatcaccgcattaagcaaacttgcttaaccaaaagattttacgtagtcgtaatacattttcgcaaaatcagataaatcattaaaagaagccggaaaatccttagattaaccagattaaccgcaaaaaataaaaaagtttaacaatattaaaaactattaaagaaatgggccttgattttaataccattaatgccagattttcaaaaagtacaggcgctaaaaacagcctattccccgtcgtgtttaatgcatttatcgacgattttatccccctctcattttacatttatttaaactgccataaccatttaaaagcacgaacacagagagattaaggtttttatgtggcaggaagatttaactatagtgcaattttttataaaggcaattagtcatacttaatcgaaggttattaactattaatagagaattgaaaagaaatcagcatgcaaaggaatattatccgaatagattgatattaaggtgttttctcgccattattttatgcagcaagccatagagataacttaataaaaaatggataaaacggttaatgtatcaggatttaaaccctaaaaaagaaaaggattattcgagaataacatatagggatatctttatacccaatggatttcaagatggatcgcggcggcaagggagcgaatccccgggagcatagataacgatgtaaccggggtgagagagtgcaaccaacaaagaggcaacttgaaagatgacggggatatatcatcaagctatttactggctgatttatcaagataaaataaaggtaaaacagagtcagtaaagataaagcaagtatgattaatgttgtttaaccgtaaaacacgatatttcataatgattaaacttaataaaaagcagatattcaaagtagtaaaaaatggttaaaaccttatgtcaattaaaacctaagattaaaacaatggtttttaataacagcacaaaaccttcccttgataaagcttatcagtgaaaacaaaaattaatttattaatgcttatataacccagaaaataagggtgtgaatagtttgatcaaacaatctatttttccaaaggaaacggctttaatcgcgttttcaaccacaagagtaattttttcataaccagttaaataattgactatcaaaaaccagcattgaaatataaacattaattaaattctataaaataagatacaatatattacagagataacttagttatttaggcaatggtaaaaccatttgatcaagttaaaaaaataaatagcaaagtattgcttataaacccaccacattgtcaggtaattactcctatttagtacttgttatttaataaaatcattataatatacttgccagctttttacggatgaccgtgactttcaaggtgcagacagaaaaagaaaccaaataaattacaaatcaatatttaaattgaaaaatacatggataataagaacctaagttttaattccaaagctatataccctatggatttcaagatgcatcgcggcggcaagggagtgaatccccgggagcatagataactatgtgaccggggtgagcgagtgcagccaacaaagaggcaacttgaaggataacgggtatatacaacaatcaggaggtatttatccttcattccgcacctaattcaggaataaaccgctttatattgtgcacctaataaactcaaaagctcatggtggtaagattgcattcctgtcaccattttatgttcttgaaattcaaaggtgctgatcccttcaaaggccagaaatacccaacgcgcggtgggggattgtgtcggtttgttcttcatatcggggaaaaacggcacattttgtttcaattcatggcgaattttatgttccagcgccgcataaaccatgagacaacatgtcatcaccattaacagcgcttctatccgctccggttttttcaggaaaatggcagacgtcaggaattccggacttttcaggaagcgaaaaccccgctccaccttttgttgtgccttataattagccagtaacgccgccatatcaagccgtccttcatcccgttcattggtcgctaaaataaacctcccgacccgcaatctggcctgcttcaccttgtctaaccgggtataagcctgaccggctaattgataatgaaccgatttggggggttgatgcttgccgggtttcccgcgccccgcatacgcggtaatcgcctgaatttccggcgaggcgatgccgataaactggcattgagactcaaaatcatgcagtgcctgtaaggcatcctcccggcaggcaaagggctttttgcccagtttgtcgaactgtttagactcgttttctgtttccctgagtgtgtttttccggaaagtctggttttcacgtttttctgccgccgtactgttcaccagtaaccaacgctgaggaacgccgccatatgatgacgtcacccagcagcctgaatagccctcactgatggggctgaattgctccgctgtcacgttcaggagagactgtttagcttccttgatcgtcaggggaacacgcgtaataaatcgttgtttttgctgatgaagcgaagcgatcgcggcttcagtataaagggcggcatcggccacaaagtagcggctgttttgtgctgctttcaggcattgaatatgggttttgatcgtctgggcaaaggctttggcatcattcgtattcccgctcatagcctgcatatagacagggatacctgcctgattttcgcaaatcagttcaaggacaacctggttcagttcaggccggtgatcccggctataacccggcaccagtgcaatacgttttgtgtcatctcccaatgcgctgtcatagtcaccatcgacatgaaaactcgtgatatccaaatgaacggaatcgggatttaaccctaatttatcaaccacttgctcagcaagcacctgataaacttccgacacccccgcttcatataaggcatccagtgtacggccgagcacatcatcattaaggtgttcagcttcaatgtcagcaccaattaaacgcgcaatcggcttatgttgaaaaaagccggaaaacatgtgcaatgtccggctgtgaaaccccagcccgttaaggatcatcgccagaaaagcgtcgccgtgagagacagtatgcgatgaatattttgggataatggcatcaatcatgcggggtaaaccggcttcatgacaaaaagcggcgataaggccaagatgatcgagacgtttaatggcaggtataggtgtggacatattcgctttccggcaaataaaagtaatagatcaaaattggcgattaccgtcaaccccaccgatgtcatcaatacaaaaaacctgtgtaagatcacattatttttaaatcagaaatacggtgcggaatgacggatttatccctagtggtcaatccctcagtagcacagaaagtatggaatggattagtcaagcatggggtatcgtcaaacgtaaattgggtatgtggatactacttagtatcatttatttcattatcatatttgttttacagcttattcctttccttggggtatttactgtactttttggtccagtatttttgggtggtattattgccatgtgtgaaaaacagagaactaccggagaatttgaaccagggctgttattcagcggatttcagaaaaactttgtatcactgcttggcattggtgctttatcatttggcatcatgcttcttggaattgtcgcaatgtttattatcagcagtagtacaatggctcatatattgttagataaccaatatgatgagatcccggttgaagtattcccaaatgatctctctccattataccttggtgcttttgttctgattatttttaacatttttggtactgctttaacctggttcgcaccagcattaatcgtcattcataatttgaaatttggggctgccgtgtcaatgagtttggaagctgtgaagaagaatttattacccggtttcttattcttcatggtcatggcagtaatgttcataatttctatcatgactttgggtttgggccttttaataaccattcccctatttttagtcagctattattcctcataccgtagcatttttattggaaaggagaaattatcttctttaattatttaactctttattaaatctaataattttattttcaacaaaaaaatcaataaaaacgaagcaaaaagcgccaaatctggcgctttccattaatacaataatcaaccaatatattccaaaccacccatatatggacgcaatacttccggtatttcaatacgaccatcggcttgctgatagttttccataacggcaaccagagtacggccaactgccaaaccagagccattcagggtatgaagtaattgagttttcttatcttctttaccacggaaacgtgcttgcatacggcgcgcctggaaatcccacatgttagaacaggaagagatttcacgatatgtgttctgagccggtaaccacacttccaaatcataagttttacacgcgctaaaacccatatcaccggtacacaataaaactttacgatatggcagattcagtaattgcagcactttctctgcatgccctgtcaatgcttccaatgcatccattgattcatcaggatgaacaatctgaaccagttcaactttatcaaactggtgcatacgaatcagacctcgggtgtcacgaccataagaacccgcttctgaacggaaacagggggtatgagcggtcattttcaatggcagttcattttcatccagaatgtcaccacgaaccaagttggttatcggaacttcagcagttgggatcagcgcgtaatggctttccgcctcttcttccagcggcttagtatggaaaagatcttcaccaaatttcggcaattgacccgtaccatataaggtttcatggtttaccaaatagggaacataagtttccaaatagccatgctgttctgtgtgaaggtttagcataaattgcgccaacgcccgatgcagacgagcaatttgccctttcatcaccacaaaacgtgaacccgttagtttaaccgcggcagcaaagtccagaccattggtcagttcacctaatgaaacatgatcttgaatctcaaaatcatatttacctggctcaccccaacggctcacttccaaattatcgttctcatctttacctaccggtacagaatcatctggaatgttagggatacttaaagccaaatcacggatttcagcctgaagtttttccagttcagctttcgctgtatccaacttttcacctaactggttcacttcctgacgcagtggatcaatatcttcaccacgggcttttgctgcaccaatagctttcgatcgggaattacgttctgcttgcagggtttcagtttcaacttgtaaaactttacggcgctcttcttgtttgcgcagcgtatccacgtcaagggtatagcccctgcgagccagtttttcggcgactgcgcctagctcattacgcagtatgtttggatcgagcatgctagtcctgtgcttgtcgttattaagttatacccgctatctttcaagttgcctctttgttggctgcactcactcaccccggtcacatagttcgctatgctcccggggattcgctcccttgccgtcgcgatgcttcttgaaatccatagggtatagatgatatgaataagcccacacaagttgatgggccataaggtatttttacccgtcaaccttaccgcaacaataacgttagcgatagcgttttatcgggctattttgatcctgttcagcaagccaggcgagtttatcgcctattttaccttctaaccctcggttagtcggatggtaatagcgggtttcccgtatctcaggtggaaaataaacttcacccgccgcataagcattaggttcgtcatgggcataacgatattcttcgccaagccccatctctttcatcaattttgtcggtgcattgcgcaaatgcacaggaacatcataatcaggtttttctttcgcatcagccatcgctgctttaaaagcggtataaaccgcgttacttttcggcgcacaggcaaggtaaacaatagcttgagcaatcgctctttcaccttctgccggcccgacacgcgtaaaacaatcccatgcagcaatagctacctgcattccccgaggatcggcattaccaacatcttcggaagcaatagccaataaacgacgggctacatataacggatcaccgccggcggtaatgatccgcgcataccagtaaagcgcagcgtcaggggcagagccacgaacggatttatgcaatgctgaaatcaaatcgtaataacgatcacctttattatcaaaacgagcacttcgctctccactgacctctttcaatagcgccggtgtcaaaaccctctgtccctgagcattggtttctgccatatccgccatcatttccagcaaattcaatgaacgacgggcatcgccagcaaccagctccgcgatcatgtgacgggtattttcaggcaaaacgatattctgaccatgataaccgcgctctttatcactcatggcctgctcaagcacctgctcaatctcttctgttgtcaatgatttaagcagatagacacgtgcccgtgaaagtaatgcagaattcagttcaaaagaggggttttctgtcgtagcgccgataaaggtgatcgtgccatcttcaatgtgtggcagaaaagcatcctgttggcttttgttaaatcgatgtacttcatcaacaaacaggatagttctacgccctgcattccggttctgacgcgctttttcaatcgattcacgtatctctttgatgccggaagtgaccgcagatatccgttcaacatcagcctgagcataatgcccaataatttcagctaatgttgttttgcccgtccccggtggcccccataaaatcatggagtgcagttgtccagcccggatagcccttggcagaggttttccctcagcaagtaaatgccgctggccgatatattgctctaatgtcatcggccgcatacgcgcggccaatggccggaattcattttgagaaaaatcgagtgacaggttgttcacttaaacctcactggcgctgatcatccagcgtaacgcctttcggtaacgtaaaactgaactttgccgcatctacgtgggtattttgctgcccttttagttgataagcactcttttgtccatcctgctcaatagcagaaaatttttggatagtgccatccgtcgtaacggtaatcgagaaacgtttcagattaccagtgacattattcggcgtcagttcaaaatcattcccttgctggctaattttatattgagaccattctttagcatcgttacgagtaattagcataaatggcgtattacctgtggcatctttcaaccaattagccgttacctgctcaacaaacggattatagaaccacaatgttttaccatccgataccaaaacactttcatcaggtgatgtcatatgccaattaaataggtttggacgtttaacccataattgcccctcaccttcctgaattgttgccccatcatcactggtgacggtttgagtaaagctagcatgaaaactatttactttacccaaacgttcctgcaaattttggctagcattcgcccatgccacattgatattcatgccagccattaaacaaccaatcaatatcagctttttcatgtcagagatacctttctcagcgttattacttctttctcaacgttattacttcaagtgatccattatcagggtcttcaacgttcaatattcatataccctatggatttcaagatgcatcgcgacggcaagggagcgaatccccgggagcatagcgaactatgtgaccggggtgagcgagtgcagccaacaaagaggcaacttgaaagataacgggtatatcagctctcatgtggtggtggcgctaatacttcacgattaccattatgacccggagcgctgacaatctgctgtgcctccatctgttccacaatacgcgccgctcggttataaccaatacggaattgacgctggacaccagaaatcgaaactcgtcgcttttccgtcacgaattgaacggcctgatcaaacagggcgtctagctcttcatcactatcaaaacctgagcccccctcagcatcatcaccaccactgagaatgctgtcaacatactctggacggccgcgggctttccaatcattcaccacttcatgaacttcctgatcccgaacaaatgcaccatgaacacgcaccggaatcgaggagtttggtgccagataaagcatatctcccatgcccaacagggattcagctccgccttgatcaagaatggtgcgggaatcgattttgctggaaaccgtaaaggcaatacgagtcggaatattcgctttaatcaagccggtaataatatcgacagatgggcgttgagtcgccagaaccagatgaataccagcagcacgtgctttctgtgctaatcgggcaatcagctcttcaacttttttgccgacggtcatcattaagtcagcaaattcatcgaccatgacaacaatgtacggctcttttttcagcaccggatgaataacatccatgctgtcacccggcttccagaatggatgaggaattgggcgtcccatctcttctgcctgcttaactttttcgttataacccgccagattacgcacacccaatgcagacatcagtttataacggcgttccatttcaccgacactccagcgcagtgcattagcggcatctttcatatcggtaacaacttcggttaacaggtgaggaatgccttcataaaccgacaactccaacattttcgggtcaatcataataaagcggacatcctctggttttgctttatagaggatactgaggatcatggcgttaacaccaacagatttacccgaaccggttgtacccgccaccagcaagtgcggcattttacctaaatcagcaacaaccggctggccgccaatatctttacccaacacaattgtcagtggggatggattatcgcggaatttttcacaatccaatacttcacgcaaatagaccgtctggcgctttttattcggcaattccaagccaacataaggtttacccggaatcacttcaacaatacgcacagcaaccgctgatagagaacgtgctaaatctcttgataagttggaaatacgtgatgctttaacacctggagccaaatccaattcaaaccgggtaatcaccggaccgggtgaaaaacccacgacatcagctttaactcgataatcactcagacgcgcttcaatcaaacgggacgtttgctcaagggcaaacatatcaacgggttcctcttccgctaaaggactggttagcagatcgagcgaaggcattggtgtcgtcggttttggcaacggttgatcgttacgaaccaaaaacggatgaaataagctatcttgctgcggttgctgcggttgctgcggttgctgcggttgctgcggttgctgcggttgctgcggttgctgcggttgctgcggttgctgcggttgctgcggttgctgcggttgctgcggttgctgcggttgctgcggttgctgcggttgctgcggttgctgcacaacattgtgtacaggtgctggcgcaaaagcaatttctgtaggccgttctaattgattttccggtgctgagtgaacagaaggcataaatagcggctctgctggctctttttcaactaaatcttcaaccggtgaaaaattatttaaaatcgataaactctccagagcagaaagctcttttttctcctgatgaccttgctcctgataacgcttatattgcggctgctcaactgtctgtttaacagtctcggtcgctgtttgagcccgttcttccaccgaaggctgattttccggctcaaatggattctgtcttatctgaggctggattggggcctgttcttctgtatccgtcgtaatacgataacgctcgcgctgttgttcaagaaactgctgactcagcaacacttcttgctgtttatcagactcaatatcatcatccgctccaccgacttgttgtttgacctcttcttcacgctgttgttctgcaagacgttgtgaaggcactttaatgccatacagttcacggcgggttggaatacggacaggattaggacgaggcagttctggcccgattccttgcttaacctgagaattgcctgttataaccgttgcagaagttgctgctacaacattttttggttctgtttcaggcataaaagtgaaggtgtcgctgctgttccggctattttcgacgggttcaaatgtcggcgtcccttgacggttaaattcagatataggctcaaaatggtactcagcaggaatttcaaacgtataacgaacaggttcgtcgttattattcttttcactctcttccactaatggctgagactggacaataccatcatctgatgtattaacccgaatttcaggttcagcatcaatattagccatattagtggtaggaatatctattggctgttcttgttcgatttcgatttctgctttcaccgattcgggttcgtccagttcagcttttgctaactctacggctgaaggtgctgtaaatagcacatcatcatgatcaataccagccgctgtgaattcaggttctgttttatcatcggcgagatcttcccgcgcaatagccgtttcatcgtatggcgtatattcttgttcattacggctgcggttggtaatcaatcctattgctcccagaatgattgctcccgtcttttcagcaatggttaaccatgaccaaccagtaaataacgtcaacccaattgcccaaatacacagcaagaccaaagttgcacctaattcattaaaccaaggcaacatcgcactactaaacagactgccaataataccgccggaagcaaagtaatggagatcgtcaacattcagtgccgctaatccacatgaagtcaaaacgattgccaatgcaccaataacgcgcaaagccaacgcaaagaaatcaacatactctcggtcatcatgttgcttaaaagcagtccagcaacccaatatcatcactggggggatgacataagccagaatgccaaatgcagaaaacagcgtatcggccagccatgcccccacaccaccccccaaattatgcaccggctcatgccatgcagtctgagaccaactgggatcagaagggttaaaactgacaagtgcgaccagcagataagctgctaggataacaatgacaagcagcacagcttctaacagcctgcgcccactactcagtctctttaatttaatatttttatcttctgtatattcctggctcaagaaaggctctccaggtttcctgttgatttaacggaacaacgccgagatagctcagcgttggaactgtatgcataaacaggagtgtacctaagtttttccagttttgcacctgtacatttttggtaagattttagcgagtcttaatgaccagacgattgctctgcttaacttcttccatcacaacatatgtgcgagtgtcattaacacctggcaaacgcaacaaagtttcgcctagcaacttacgataagctgacatgtctggtacgcgagttttcaatagatagtcgaaatcaccagaaactaagtggcattcctgaatctcttccaatttttgtacagcagcgttgaattgttcaaaaacatctggagcgccgcggtttaaggtaatttcaacaaataccagcaaagatgcatccaaatagtgaggattcagcaatgccgtgtatccagtaataaacccttgacgttccagacgacgaactcgctccaaacatggggttggagataaacctacccgtttagacagttctacgttagaaattcgcccatctttctgtagctcatttaggatattacgatctatgcgatcaagatcttttcccggacgttttttattatctatcatcttgttgatctctctttattttcctacacccataacattttcccctatctcttgagtttgagttggaaaagatgtcttaaagttaaagcctcgctctatacagcgtaaagcaactcacaggccatttttttaatgctactagagggaattatccgcatgtcgatttttatagaaacgaatttagcgaggtggataattatctcttacagtgatgttttcgcaaatgcacagccgattgtcaaagtaaatgagcaaaaatcagaacaacctgtggaacaaattttcagttaatcgtttcgatagtctaccattaattgaaaatgagcaaataaaatccaaaccgcactaaaaggacacttttctcaggttaaaatcattgttagttaatatctatcggtaaaatcgttagtaacatgagtcttttaactttttttaccctcctatttctcctacaatcgttcgatattcgataggtgataatatggaaatgaggtattcatgagcgccgccaaacaccacaaacttattattcttggctccggtccagcaggctatactgccgcggtttacgctgccagagcaaatttaaatccggttcttattaccggggttgaaagaggcggtcaattgactacaaccaccgaggtcgaaaattggcccggtgatccagaaggtctgaccggcccagggttaatggaacgcatgcaccaacatgctgaaaaattccaaaccgaaatcatttctgaccatattcaaaaagttgatctgcaaagccggcctttacgcctttatggtgatgagcaagaatatacctgtgacgcactgattatcgcaacaggtgcttctgcccgttatttaggtttaccttctgaagaggcattcaaaggtcgtggtatttcagcctgtgcaacctgtgatggtttcttttatcgtaaccaaaaagtcgccgttgtcggcggtggtaataccgcggtagaagaggccttatatctggcaaatattgcagcggaagttcacctaattcatcgccgtgatacattccgttcagagaagatcttgatcagtcgcctgatggataaagtcaaaaatggcaatatcatcctgcatactgatcggattctggatgaagtactcggtgatgatatgggcgttaccggtgttcgcctacgcgataccaaaagtggcgctacagaagaattggctgttaccggcaccttcattgccatcggccatactcccaataccgctatttttgaaagccaattagaattggataatggttacattaaagttcaatccggtttacagggtaacgccactcagacctccattcccggtgtattcgccgccggtgatgtcatggatcatacttaccgacaggcaattacctccgctggtacaggttgtatggcagccctcgacgcagaacgtttcctggatgggctagccgctaaataaattctttttctttcaaggcgctatttcggtagcgctttttaacatgtaacatatcagcaggatgctgacacataggatatgtccagccttttggtacaccattaccctcacctgttgaattagaatttttccttatggataaaacaagacagtatgaattggttcgctggctgaaacagcaaagtgccccggcccaacgctggctccgcctgtccatgttatttggcttaatcagtggattattgattattgctcaagcctggctactggcctcaattctgcaagctttaatcatggataatcttccacgcgagcacatcacgaacgaattttggttgctagcagccacctttgcgttacgagctatcatcagtgctattcgggaacgaatcggttttatttgtggcaaaatcgtgcgtcagaaaattcgcgctatggtattggataagctggaacaacttggcccaatgtgggttaaaggcaaaccagccggtagctgggcaaccattattcttgagcagatagaagatatgcaggattattactctcgctatctgccacagatgtctcttgccgtcataatcccgattcttattctgatcaccctattccctgttaactgggctgccgggctaattttattcgctactgctcctctgatcccgctatttatggcactggttggtttaggtgccgcagacgctaatcggcgtaattttgtcgcactagggcggttaagcggtaattttcttgataggctacgtgggttagaaacgttgcgcctgttttatcgcggcaaagcagaaacacaacaaatcagcgaatccaccgaaaacttccgttacaggacgatggaagtgctgagattagcgttcctttcttctgcggtgctggagttctttgctgccatttctattgccgttgtcgctgtctatttcggtttctcctatttgggggagcttaattttggcagttacgggatgggcgttactctgtttgccggttttctggtgttaaccctcgccccagagtttttccagccattacgcgatctgggtacttattatcacgctaaagcccaagcggttggggccgccgaagcattagtgactttattgagcagtgatggtgaatatgcacctgctagtggtgataaaacacttcccccccaagatccgttgaccatcattgctaataatctggaaattttggcccacgacggcaaccggcttgctggcccgttgaattttactatagagaaaaatcaacgggtggcattagttggtcaaagcggagcaggtaaaagttccctcttgaatttactgttagggtttctgccctatcgtggttcaatacaaattaatggcaccgaactgcgtgagttggatcaacagagatggcgtaaccaactgagctgggttggacaaaatccacatctgcctgagcagactttgcttgataatattcgtctgaaccaacctaatgccaatcaacaacaaatccatcaggttatggaacaagcatgcgtcaccgaatttattcacgatttacccgatgggctgaataccattatcggtgataatgcagcacgattatccgttggtcaggcccaacgtatcgcggttgcccgtgccctattgaaaccttgccggttattattactggatgagcctggtgccagcctggatgcgcatagcgaacaacaggtgatggcaacactcaatcaggcatctcatcatcagacgaccctgctagttacccatcaagtggaagaaacgctggaatatgatcagatttgggtcatgcaaaaggggttgattattgaacagggagattaccagacgctaagccaatctcaaggggtattcacccgcctgttatcccatcgaagtgaggagctgtagttatgcgggtattgcttccttttctggcgctctatcgtcgtcattggtttcttatcagtttaggcatggttctggccactgttacactactcgccagcataagtttactgaccctctctggctggttccttgcaggcgcagcactagcaggtcttgccggttatacattcaactatatgctaccggctgccggtgtccgtggctcagccattcttcgaactgccggacgctatgctgaacggttggttagccatgatgccactttccgggtattggcacatttacgggtttttgcctttcagaaaattttgccactttcaccgggaggaatagctcgttttcgccaaggcgaattattaaaccgactagttgctgatgttgaaacactggatcacctctatttacgagtgatttcgccgatattatcagcttttatcgttatcatggtcctcactttcggccttggctttctcgatctcacattagcctatacccttggcggtattatgctggctctgttgatcctgctgccatcagtattttataacgcaggtaaatccgttggtcgcaatctgactattctgcgtggtcaataccgcacccaactcacagcggcattacaagggcaagccgaattgatggtattcagtgctgttggccgtttccgcaagtcaatggctgatatcgagtcacgttggttaagatgccagcaacagcaagcgaacctaaccggcttgtcacaggcaatcatgatttttgccaccggtatgactgtcacattgatattatggctggcagctaacggcgtggggggaaacagccagccgggggcactaattgcactgtttgtcttctgctctcttgccgcatttgaaaccctgggccctgtcactgttgcattccaacatctaggacaggtcattacctctgcaacccgtgtttctcaattgatgcaacaagaaccggaagtcatgtttcctacatcagggccggaaagttcagctcaagccagtattgatatcaaaaatatcagtttcacttatcctgatcagccaatggccgtcctgaaaaatgtttctctctgtttgaaagcaggggaacatatcgcactgttaggcaaaaccggttgtggtaaatctaccttgctacaattactgacccgggcctgggatattgattcaggctcaatctgtctgaatcagcatgctattactgcttatgacgaatcaactctgcgcagtatgatatcggttgtttcacaacgtgttcatgtgttcagtcatactttacgacagaatttattactggcaaaaccaaatgcaaccgataatgaactagaaactgtgctgaaacaggtaggtttaagcaatctactggaaaccaatgagggcctaaactgctggatgggcgaaggcggtcgtcagttgtcaggcggtgaacagcgccgcttgggaattgccagagcgttactgcactcggcaccactgatgttactggatgaacctacggaagggctcgatgcggatactgaacagcaaattctatctctattgcgtcagcattgtcagcataagtcactgattattgtcacccaccgcctgtacgggcttgaccatatggactgtatttacatcatggatggcggcactattattgaacaagggcagcataatgaattactggctcagcagggtcgttattatcagttttatcagcggcaacatcagattcgtcttgaaccggggcagtagcacatgatgccaataattcaattgaatgctgattcatatgatttccctcacccgaaagaagcattaacggagcctaacggcttactggcagtcgggggagatttatccgctaagcgattaaatgcagcctaccatcaaggtatttttccctggtttttacccagtgaaatgccactttggtggtcccccgatccacgtgcggtaatcattccgggtgaattgcatatcggccgaaccctacgccggtttctgcgcaataccccataccatattacggtgaatcatgcttttgaacaggtggtccatttctgcgctcaacggcaggaaggaacatggataggcaaagatatccaacaaggctataaaaaattatatcagacaggacaagcacattcagtagaagtctggcacaatgagcggattgttggtggtttgtacggtgtcagcgttggcacactattctgcggtgagtctatgttcagcagaatggagaatgcatccaaatgtgcgttcattgccttctatcaccattttctgcgacacggtggtgaattactggactgccaagtgcttaaccatcacacagcttcactgggagcaaaagagatccccagagaagaatttattcagtatctttatcaattcagaaatcggtcattaaaagctggttgctggttacaacaagtactggaattataatcaacatttgaccgattcatgttgctgataacataaatatcactatgcactatttgcaaaatagcgggttaaaatacaacattcctttacataatgagggtttttcggcattatcttgcccgttaaaaacgatggttattaaacttagaggattagatggccaaagaagacaatattgaaatgcaaggtactgtgctagacacactaccaaacactatgttccgcgttgaattagaaaacgggcacgtagtcactgctcacatttcaggtaaaatgcgtaaaaactatattcgcatcctgacaggcgacaaggttacagttgagctgaccccatatgacctgagcaaaggccgtatcgtcttccgtagccgctgattcattaccgtttttaggtattacaccacaggtagcaactttgtattttacaactttgtatcttacaactttgtattcacctgtggtgtcgctcttctattagtgcactacatcttccggtttctgcttataagcattgctgaaatcgtaggtcagtatgcgttttgccttatccaggccaatactcaccgagccaccgtgaactaatgagccgaataggagttcatttgccaacggttttttcaagctatcctgaatgacccgcgccattgggcgagcacccattgctttatcatagcctttatcacatagccattgacgagcatccgcactgacctccagcgaaacgcctttttcatccaattgtgcttgcaaggcgacaatgaacttatcaactacctgctgaatgacttcaatagaaagcgtattaaaccagatgataccatcaagacggttacggaattccggtgtaaacactttcttaatttcttccattgcatcggagctgttatcctgctgcttaaatccaatggatttgcgttgtgtttcacgtacccccgcattcgttgtcatgactaaaatgacgttacgaaaatccgctttgcgcccgttgttatcagtcagcgtaccgttatccatgacttgcaataacaggttaaatacatctggatgtgctttttcaatctcatcaagcagcaatacggaatgaggatgtttaatcaccgcatccgtaagcaatcctccttgatcaaaaccaacatatcccggtggtgcaccaattaaacgacttactgtgtggcgctccatatattctgacatatcaaaacgcaataatttgatattcaacaccttagcaagctgtacggtgacttccgttttccctacgcctgtcggacctgcaagtaggaaagaacccaccggtttattatcctgccccaaccctgcacgactcatcttaatggcttcggtcaatgccgcaatcgcgctatcttgaccgaataccaacattttcagccgctcatccaatgttcttagaacatctttatcactggcagaaacggttttttcaggaatccgggcaatccgggcaacgacgaattcaatatccgacacattaatcgtttttttacggcgactaatcggcaccagacgggtacgcgccccagcttcatcaatcacatcgatcgccttatccggtaagtggcgatcagtaatgtatttcaccgataaatcaaccgcagcacggatagctttcgtggtataacgtacatcatggtgcgcctcatattttggccgcaaccctctaataatctgtaccgtctcttcgggtgaaggctcaacaatatcaatcttctgaaaacgacgcgctaacgcccgatctttttcaaaaatattactgaattcatgataggtcgtagaaccaatcactctgatacgtccactggataacaatggcttaatcagattagccgcatcgacctgcccccctgacgcagcccccgcaccgataatggtatggatttcatctataaatagaatactttttctatcctgctcaagggtttttaacaatgctttgaagcgcttctcaaaatcgccacgatatttagttcccgctagcaatgaaccaatatccagcgaataaatcgtacaatcagccatcacttccggtacatctttttgcacaatccgccacgccagcccttctgcaatggctgtcttaccaacccccgactctccgaccaacaatgggttattttttcggcggcgacacaatacctgaattgttctttctaactcatcctggcggccaatcaatggatcaatctgtcctctttgagcgagttgattaaggttagttgtaaaattttccaaccgatcctctcctgtaagctgctcttctgctgattgcgtgcccgtctcctgatgatccgattccgagtcctctttttgagttccgtgagaaatgaaattaaccacgtccagacgactcacatcatgtttacgcagcaaataagccgcttgagactcctgttcgctaaagatagccaccagcacattagcaccagaaacctctgaacgcccagaggattgaacatgaaataccgcgcgctgaagaacacgttggaagctcaacgttggctgagtctcccgctcatcattttcaggtaacaacggtgtcgtttgtgaaataaaattctccagctccttacgcaattgagccagattgaccttgcaggcttccaatgcttcacgcgctgatgaattgcttaacaacgccagcaataggtgctccacggtcataaactcgtgtctgttatcccgtgctttagcaaaggcaatattaagactaagttcaagctcttggttgagcataagcacctccccctaaaaatcagtatacctggtcagactttttccagcgtacaaagtaatggatgcccatactccttggcatacatatttacctgggctgctttagtttctgccacctcagcagtataaaccccacaaacagccttcccttgataatggacatccaacattaattgcgttgcccgttcaatatcataagaaaagaactttcgtaatacgtcaactacaaactccatcggagtgtaatcatcattgttaagaatgacctgatacattgacggcggctgcaatttttgctgtcgctcatccttaacagattccttacttttcaaactgttatgatactcgttcattattttcccaacggattaatctctaaaaccagccactgccagcaaataaattatgttgccacttatcttatcattatctgggcaactccttttaccacagactattcccctatgaaaactcagcataaaagtgcatgaacgaaactcatatcgttatctatatcaaactttagtcattcaaaacaaccagacatttgttctgtgcttgacgagaatttgatttttactacagtatgttttgtgaacaaacatagataatgtcactgtttacatgtgattgtttacgactgttatattaatggctcatctcaaccgaaatcattaaacgagggatgtagaagtatggagacaggtactgttaagtggttcaataatgctaagggttttgggtttatttgcccggcaagcggcggagaagatatattcgctcattactcaaccattcagatggacggttaccggacgctgaaagcgggccaaaaggtgaatttcagcgttcacctaggaccaaagggaaatcatgccagtattattgttcctcttgaaaacgaacccaaaggctaaatagcctggcctgtgggtcataaccaagtattattttcatacgccgcaggcaattacctgcggcgtcatcttatttccgcttattctcttgccaacgcttcgattggatcaagacgagcagcattacgggccggtagaaacccaaatatcaccccaattgcggtagaacaggcgaacgcactgagtaatgcaatgggctggaaaacaaaatgccaaccgggtagtgccagttgagcaataaatgcaatcgtataagacaacccaatgcctaaaacaccgccaaccagacaaactaagatagcttctatcaaaaactgttgcctcacatcactggttctggcccctaccgccatacggataccgatttctcttgtacgttcagtcaccgaaactaacataatattcatgacgccaataccgccaactatcagtgaaattactgccaccatcgtcaaaaacagttgtaaagtatgggccgtcttttccgcagcttttaccaacatgtccacgttatcggtgaaaatatcctttttgccgtggcgtaaagtcagcaactgaacaatcatcttttctgcatccttagagttataatcatcctttactctaacagtaattgagtccagataacttcggttcatcagacggctggtcattgtgctataaggcaaccagatatgcagtaatttgctattaccaaatgcagattctctgttagctatcacccccacaatcgtggccggcatattacccaccaggatcacctccccaatcacatttttctgatgaggaaacagcttacgctgggtatttttatcaataaccacaacttgcccctgacggcgtatcatatccaatgagaaccctatcccttgggcaaaacgcagagcataaacctgaaaatattcatcacccacaccagtcactttcgaagagacatcaatgttccctttgcgaagacgcatttgaccctcaatttcaggagaaacagccagaatatagggctgcactttaatcgcatctgcatccgctattttcaacgcctgcttactgaccggatcatcaatgccgaaatcttctcccggataaatatcaatggtgttcgtggcaatctctttaatatcggataacaccgatgccctagccgcatctccgataaccaaaatagtcacaacagaagcaataccaataataatccccaacatggtcagtaaggtacgcatcttgttgacaaccattgcccgccatgccatgaataaagcttcattaaaccgcccaaagatctggcgtatcgacgatatttttgatgttaacgacggagtttgagtgatttttctactcacttgcgtaccagagtcactcataatgtgaccatccttgatctcaataattcgttgtgcctgcgccgcaattttcggatcatgagtgacaataatgacggtatgcccctgttcacacagttgtttgagaatagccatcacctcttcgccggagtggctatccaacgccccagttggttcatcagccaaaatgacctgaccaccattcatcaatgccctggcgatactgactctctgctgctgtccaccagaaagttgccctggctgatagtagattcgatcttcaagccctaaacgaccaagcaactctattgctctctggcgacgtgctgctttagcggctcccgcgtaaatagcgggaatttccacattctgttccgcggttaaatgagtcagcaaatgataacgctgaaaaataaagccaaaatgttcccgtctcagcgctgctaattcatcattattcagttcagcaacattctgtcccgcgacccggtattcaccgttactgggttgatcaagacaaccaagaatattcatcagtgtcgatttacccgagcctgacgcaccaataatcgcgaccatctctcccgcgtaaatagacaaggtgacatcatccagtacttttatctgttgctccccagcgggatagctgcgctctatacctttcagctcaagtaacgcattcattactcatcccctgcttcactatgaccggtaatcacctgctcatgctctttcagaccagacagaatttgtatatttacatcattgcgtacaccaacagtcacttcccgtttctcttctttacccccattcaggatatccacctcatagcgagtcggtgtaatctgtttacccaaagcagaaagcgggatcattaatgtgtcacgataggaatcgagttgaattttcacctgcgcagtcatttgcaaacgcaaaagttgctggggattagccacctcaaagcgcgcatagaagaaaatcgcatcattaatcttttctggcgtcggcaaaatatccttcaacacaccaggaaaatttttatccggtgcgcctaatacggtaaaagaggccttctgacccggtttcaggtaaataacatccgcctccgaaacttccgcttttaccaacatcgtgccaagatcagctaatgtcagaatggtcggggcttcctgtgccgcaatgactgtttgcccctgaagcgttttaatattgacaacaatgccatccattggtgcggtaatccgggtgtattgcaaattagtctgagcagtatcaaggcttgcttgatttttactgatttgtgccagcaaattctctatcttcgctcttttcacttcaacgtctgttttaacctgatccaattcctggagagagaccgcctgcacttttgccagattgttctgacgctttaatgtaagctgtgctaatttcaattgtgccttggcttctatcagatcagcgttgagttctttgatcgtagcttcaacttcttttacttggttttgtgcaggcttaggatcaatcaaagccagtagctggccctctaccaccttatcgcccacttcaacatgcaaattctgcaactgaccactcacctgtgcaccaacatccactttcctgaccgcatccagtttccccgttgccaatacatttttttccaaatcacctttaatgacagggactgtctgatatttaattgtttctggcccacgcagaaaatgacccagaaccaatgtgataactgtcacaatagttaacaacacaatccatcgacgtttcgaacgaataaaattcatttaaatatcaccatattaagcattagattcagagaaacggtaaaaactgattttcttgcaatactttgaaaaccgaggatttccactcattccattccagatagatgccgttctttttacgttttatacccgttgcaattcattaataacatactcatcttaagaataaaaaaattctttgagcaacaacatatttcactctatcctggctattctcttaatgtaaaaaaattgttatcttttatttttatactctttacaatcgatttttatactaaatttggataaaaagacgttaatcgttttaaaggatgttaattatgtactctgggctactgatcattcttttgccgttaacgctaggctatcttacccatttaaataataagacactgttaagtgctgttcatcaccttcttaacgcaatggtctatatcatcctgtttttaatgggaattagcctggctttgttggacgatttaggccgtaacctcttctctatctttcaatatgcgataacattttttttatgtatttttacagctaatatgctagcgttattcctgcttgaaaaacatgatccttgggttgttagtccgcataaacaggacaaacccccttcccgtttacatatgatttttgaatcactgaaattatgtggtgtactgattttaggtttcctatttgggctcactggctggtcatggttgcacttctccaatcatgccagtgaaattgctttaatcgttttattgttactcgtcggtattcaattacgtaacaatggtatgagcctgaaacagatattgctaaaccgccgcggtaccattattgcaattgtcattgctgtcagtgcgcttaccggaggtgcaattgccgcacttattcttgggctgccagtgaaaacaggtttagcattggcttccggttacggttggtattccctttctggcatcttactttctgatgcttacggaccagtcatcggcagtgctgcattctttaatgacctggctcgcgaactggcggcaattatgctaattccggttctaatcaatcgatatcgctcaagcgctctaggattaagtggtgccacttcgatggatttcaccttgccaatattacaacggtgcggtggcgtcagtattgttccagcagcgatagttcacggtttcatcctgagtttgctcgcacctttactgatcgcattctttacttaaccagaatttgagccacaataatacttgatgtcataaataacagttcgggcgcttcatggtcataagtcgtcaacagtagttacttatcctaatgctgaccatttgtgacctattcatcttttcgcagtatgacaatagaataaataagcttttattgacaaattgcactaaggagagaatagagcgcgttaatcagacatgtaattgaaatatcaattaataatattctgtgcataagatattgcataattatactaacgggtttagcatcggactaaatcactgactattcagaattaaagcatgagtattcaattaaaaagcatcgattgctattacggtgtccatcaggcactgtttgatattaatcttgaatgttcttcaggggaaacgatggttttgctcgggccaagtggtgcaggtaaaagtacattgttacgagtactaaacctgctagaaatacctcgctccggccagttgcatattgctaatcatcaattcgatttcgaacaaacaccgggaacaaaggagattcgttctctacgccagaacgtaggtatggtttttcagcaatatcacttgtggccacaccttactgttatggataacctgatcgaagcgccttgtcgcgtactgggtttatccaagcaacaagcgcagaaaaaagcggataagctcctttcccgtttgcgcttagatgattttgctggccgcttcccacaacatttatctggagggcaacagcaacgggttgctattgcacgagcattaatgatggaaccacaagttttattatttgatgaaccaacagcagcgctggacccagaaattacagcacaggttgtcaatatcatccatgaattatccgctacgggtattacacagattatcgttacccatgaagtggaaatcgcccgtaaggccgcaagccgtgtcgtatatatggaaaacggccacattatagaacaaggtgacatcagccattttacgcaaccacaaaccaaagcctttgctaattatctatcacactaactattaataggatatagcgatgaaaaaactactttttgcagccctcttaggcaccgtagctttatctgcaaccgccacggaaaaagagatcattcgttttgccacagaagccacttaccctccgtttgagttcatcgatgcaaataataaaattcagggttttgatgtcgatttggccaatgccatctgtgagaaaattaatgcaacatgtaccttcactaaccaatcctttgacagcttaatccccagtctgaaattccgtcgcttcgacgctttagccgcagggattgatatcacccctgaacgccaaaagcaggttgattttactaacacttattacgataactccgcggtttttatctccgttaaaggcaaagtctccagcaccgcagagctgaaaggcaaacttgtgggtatccagaatggtacaactcaccagaagtatctgatggaacaacgaaaagagattaaaaccgttccttatgacagctatcaaaatgcaattctggatctgaaaaatggccgtctggatgccgttttcggtgacactgccgttgttaacgagtggctgaaaaagaatgaaaacttaagtaccgtaggtaacaaagtcactgacaaaaattactttggcatcggcttaggtattgcagtgcgtaaaggtaacaaagatctacaagataagctgaataaagcactcgctgacatcaaacgagatggcacttatgacatcatctatgaaaaatggtttaaataagtagccgaatctccatgaatgaattccaatctctaacaagcgccgccggcatcaccgtcggccttgccgtgtctgcattagtgcttggtctgattttagcgatgctatttgctgcctgggaatcagcccgttggaaacccttcgccatacttggcacctgttgggtcactctgttcagaggattgccagaaattttggtcgtgctgttcgtttacttcggtgcatcacaacttctcatgacactggctgatggctttgacattaatcttatcttctggcactccagaattcagatagatatccaagacttttatgtcagcccattcctttgtggtgtcattgcactttccctactctactctgcctatgcatcccagacactccgtggtgcgataaaagccattccgattggccaatgggaagccggtcaagcattaggtcttggtcgcgctgaaatatttttccgcctgatcatgcctcaaatgtggcgacatgctctaccagggctcggtaaccaatggttagttttgttgaaagataccgcactggtatcgcttatcagtgtgaatgatctcatgcagcaaaccaaaagcattgccacacgcactcaggaaccctttacctggtatatgattgtggcgcttatctatctggctatcactctgatcagtcagtttattctaaagaaaattgagatgcataccactcgctttgatcggagtgctccctgatgcttgagtatattcaacaaattttacccggtctgcaaaccagtctaagcctgaccgtcacagcgctccttgctgctttcatgatgtctgttctgttcactatggttctgaccatgaaattgccggtactgacacaactggtaaaagcctacattaccctgtttaccggtacacctttgctcgtgcaattctttctcatttattacgggcctgggcagtttccagccataaaagcgtacccgtggctttggcaattactgtctgagccttggctgtgcgcaatggtaacgctggcgcttaacagtgcggcatactcgactctgctattctatggcgcagtaaaagctattcctgcgggtcaatggcaatcttgtcaggcattaggcatgtctaaagcacaatctatgcagatcttgctaccctatgcttttaaacgggcgttatcttcctattccaacgaagttgtattgattttcaagagtacttctctcgcaagtacgattactttgctggaagtaatgggatacagtcagcttctatttggccgcaattatgatgtgatggcttttatagccgcaggggtgatttatctatgtgttaacggtatcctgactttgctgatgcggataattgaacgccgtgcacttgcttttgagcgccataactaaacgggatagggcgctctcttttggagccccatccccacacatccttccgttattcagttatgatttaataccaataacgttaaaacttcataatgttcggtatgaggaaacatatcaaacaactgtgtcttttctacacgatagttagcgagtgcagcaatgtcttttgccattgtctgagcattacagcttgaataaagaatataatccggcaccattttactgagataatcgcacaacaccttaccaattccccgacgaggcggattgaccaaaaccaattgcggaatttgatcttttgctacagcaaaatgagttgaatccaaagcttgaaactcgatgttttccaaacccagtgttttcgccgaatcgcgagcacaatcaatggcttctgagctgatttcaatgccggttaaacaggtatttttatctgcgcaatgcagaccaaagcccccaacaccgcagaatagatcccacatgctactgattttcagttcacgaacccaacgccctgctgttgcatacaattcagaagccattttcgggttagtctggaaaaagctatgtggacgaatgtaaaggggaatgccattgaactgctctttaaacgccttttgttcagtaaacagaatctctttttccccctccaaaatcgccatatggattggctgaatattggcagagatcaccgtaagctgtggcaattgctcatgcaaccggggtaaagcacgctccagttgagcaatttttgtttcagaacgcagtacaaaacgtaacatcatttcaccgctatgacggctttctgtcagcaacaaatatttcagttcacctcgtttacgagcaacgttatacggtgtcaacccggcacacgcaatgaacgatttaacaacatcgaatacaggctgaaaatgcgctggatagaggggacaatgacacagatcaaccgccgtgccatcacgatgcaacatgcctagcaatgggcgttctacactgccactgacgaccattttagctttattacgaaaggcatcttgttggctggcaatcggaggtaaccattgcttcacaatagcttgaggtaataactgctttaaattctgctgcttatcttctaactgctgagaatagggtttttcgagccactgacaagagtgacagtgccccgcagaataatgcgcacattgcattgttggatgaccgtgttgaaaatattagtgcaaagtaaaagtcggtgccttaacaggagcttgtgactcctcttcctcttcaatgtcaccctcgatttcgatatcacgattaatatacaacaagttattactgtgaatttcaaaaatcacacccgcaatctgctcttcgctttgttgcaagaaatgagaaaactgggaaaaagtcagcccggctgaaacaaggaaagattgacacaccaccaatttcggtaagttttcatcctgaatatcaagaaaagccttgattgtcagcgaactggcattaatctggcttagattagccatcaaaggaataatggcggttggtttaacttcagccaacgcagaaaacaagattacattgtccaacagatcgattttagcatcaaataaaccatcaatattctgcatatgagggagatgcagcgcctggcatgaatcgcactcaaagtaggaaattttgagctgatccaaccactcacgcaatactgataagtcaggaatgacaagtgaactcatctaacaaccccatacaacggaaaatgaaaaagcgctatagcttacgaaataattctttatcgcgctatcaccaataactgataaattatttttacttaccgttatcactaccttctaccttatttttgctctcttttttatgatcaactcccagaaaagagaggccatacactgcacgccaaatgatattaaccgcagcaggaaccaaacaacctatgccgatgaaaatcataacaacatgtgcttctggcgtcattagtaaatctgttaagatgacaatatcattaatagtcaaatatgccaggagcaagcctaaaatgccgacaatttctagcaggataacctgttttggcatatctgccaatgaactcatactgccttgatgacttttcatcgtatcctctcttaacaacctgatgcgacattatactaccggaaacactgttaccaaaattggtatgatgaattaaaacaaaaggtaatttctgcttttttttaccgatcagtacaggcatagtagccatcaaataagcatgagtaacacatcacaccgcattattttaatataaccaagaggaatttatatgtttactgtgattttcggtcgtcctggctgcccgtactgtgtccgcgcgaaagagctggcggaacgactgaaagagcagcgtgatgactttgacttccgttatgttgatattcacgcagaaggtatcactaaagctgatctggaaaaaacagttggtaaaccggtagaaactgtcccgcaaatttttgttgatgagaaacatatcggtggctgcactgacttcgaagcgtacgtaaaagaacaccaattgctacaataatcgaacttcaatcgaacttctcgttttgctttcgttgcggtgaaaaccgcgattgattattaatcacagtggactcggttgatttgtgcaaaaaatgttattttcatcaaattgaaaaaaatctgtttttttttcttatcacgaagaacttttttgccaaaccgcagtctgaattaatgccactgcttttctttgatatccccatattgaggaacccgatagtcaatccattttggttcgagactatcgggtttttttattgtctgaagagtataccgttcacaaacacataaccgattctacagatgatcaacctatcaaccaccggtactatcaacacgctgatcttaagattattataatatatatcaatgtgttatttattttttgtccagatgactgcctgatgtttccttgacggaaagataaaccaaaaataaataacaccaataattaagacaattacgctttactctcaggtcagccaactttactctcttgcgtccgactatcgtgatgtacataagtgactatatgtgaggcccgatttgttagaacaaataaatcatgatctgtttacctttttcaatgctacgcctgaatcatcaccagccatgattgcaatggcgacgttcattgcaaaatacctggttcttattttccctctaatattggctagtttctggttctggggttcagagcgtactcgcccttatcatcgggttatcgtcagtaaaaccaccattgccttctgttttgctatgctaacctcatactgtatcggtttactctgccctcacgaccgcccttttgcagaaggcttcggttataactttcttcctcacgcgccaacaacctcattcccaagtcatcatggaacaaccgtcttcactttcgctttatcctttttattctggcacaggatttggccgggcttatgtatgatggcaattgcactggcaattgcatgggccagagtctatttaggcgttcactggccgatggatatggtcggagcatttatcgtcagcctaatgggatgcacttttgcgcaaataatatggagcctgtttggtgaacgtttacaaaaaagattgaacagtctgtaccaacattgctgcgcttttcctatccgtaaaggctggataaaaagttagcaacataaatgcaacttagtgacttgagataaacgaacgctatctcaaccaaagtctttttattagaaattattgactaattttacatgccaaaatggatatgagttaaccagcagggtaatatcctgtaccctatctagcatttatttgcgcttaaattcaactcaacgattttcatataaatcaataaatctatataaatcactatgtaaatagatatataacgaaagagattattaaaatttgatcaaagaatggctagcacatctttcattcatattattgatgctattaatctattattctggttttatctatatctttcacaaagatacaagtattacataagagatatctattttaaaatctggtaaaaaattgatatttatcaatttattaaccatttactctatttgccattttcattcattaatatgtaaataaatagacaggaaataacaaaaacataagaaaataataagagttgaataatgggcaaattgaggttataatttgacctcattgaaatacgcaatatttagacaacaattacactaaatctcgtaacatgatgacttttcgggatgtattccgcatttgagactatgatcacggtactattcactaaaaatcgctatcttgccgctatcaaaagtctggtcttaaaatttccagactttctttcaaaaaagaaagtaaagcgaaaattttggcttgttaatttaaagtccaattttcgaccaagatgttaatgtggtaataaaaacgtttaaataaccaccagagatatttagaaaatttattttttataaagaaagagttaggccacatgtatttgcatttattgcatacttgcggcattgtaatttcattttttaatttaccgcgttattctcggagataactatggatatgactcaaacaggtacgatcgcatcgcaggcgaccagcccaagcgattataaaacctggcgtaaatcagatacagtatggatgcttggcttatacggtactgcgattggtgccggtgtattattcttacccatcaatgctggtattggtggcctactacctcttttggtaatggcgctactggctttcccaatgactttcttcgcccaccgcgggatgtgtcgtttcgttctatcaggtaaaaaccctggcgaagatattaccgaagtcgtagaagaacactttggcaacctggcaggtaaacttattactctgctctacttcttcgctatctacccgattctcttagtttacagcgttgctattaccaacaccgtagacagctttattgttcaccaattacacctgccatcacctcctcgtgctctgctggctctgatcctaattactggtgtaatgaccatcatccgttttggtgaacaggctattgttaaggcaatgagcgtgctggtattcccatttgttgccgttttgatgctactggcgttttatctgatccctaactggaataccgcaatcttcgaaaacatcagcgtttctgcatcgagtgcaagtcatgggctgctcattactctatggctagcgatcccagtaatggtgttctccttcaaccactcgccaattatctcggcatttgcggtggcaaaacgtggagaatatggtgagcatgctgagaaaaaatgctcccgcattctagcttacgcccatatcatgatggttgtaaccgtgatgttcttcgtattcagctgcgtattaagcctgtctccagaaaatctggcagaagccaaagcacaaaatatttctattctgtcttacctggctaaccactttaatacaccagtggttgcctacatcgctccgtttattgcattcatagcaattaccaaatctttccttggccattatctgggtgcacgtgaaggttttaatggtattgtggttaagacattgcgtgaccaaggtaaaactattgagcctaaaaagctgaatcgtatcactaccattttcatgttagtaacgacttggattgtcgctactctgaacccaagtattttggaaatgatcgaaagattaggtggtcctattatcgcaatgttgttgttcattatgccaatgtatgcaatcagcaaagttcctgcaatgcgcaaatatagcggcaagctgagtaatctgtttgtcgtctttatgggattagttgctatctctgctgtcctctactcactgtttgcataataaacatttggttgctgttctcttcaagcgggcagcaaccgaataacgacatgagctagctagcggaaaaatttaaactacactacccacttcacccaattcccctgctgttcatcatattgccacaaatcgtcttcgttaaaatatccacgttcgtctattggtaccccttgctgttcttcttcgtcccattgttgccgcaacttatctgtcaggatataaggcgtcttggtcacaatctctccagtaaaaggaaacctattgccagcctcttcaagacggataaacctggcatcggtagaaatattagagataactaccgcctcagttgctgaaggaaagagaatataaccgttaatcaacgggaaatatcgcggcaaacccggcttatacggtgatggaatgatatcaacggcgttccacataagaagataatctaacccctcatcgttattaggccccattggataaccttggtaaaaataacgattatgaattgaatagttacccgtcaatacatatgcaatataaaaatagtaactaatcagatctacttcttctgttctaaacgtaccgaatattgaatgtaaaggaaatgtccccataccaccaaggagaccaagaacctcatactgttcatcatgaccatattgatcaatatatctcccggtcttgattttcgacacctgcatatctgtcaaaatgttatctcgtccattacttggattgaatctatatcgaccataaagaaagtgcagactatcctcataaatgtaagtaaattgctcctgattaagcttatggagaggattaggtttatccgcccaccgtttgtcatcacctaaattattacgatttccaaaacggatagaaagcgctaacggatcaagatatgacatataaccaccttttcatcatagaatagtgaattctaattattttatttctaataacattcttttattaacaaatataaaattactccaatacaatttatccttaatattgaaatagttatttatatggctattttatttattattgagttttttaaagaatagaccaatacttcataaataaaagttttttttataaaaaacacatacaacatctcatttgcattaatatttatataaatttcaaataaataaattaaccatatttatttacaataattaaaaatataatttaaatttttaattatcaaactaatcattcaaaataaataaattacaaataacattttaatttaatataattatatgaaatacaaaaaattccggttattttatatttatcacattaacaatttattttctattttttggcaatatgactctacttatcaattaattacatatttttttcaaatttatttgacaacttataaatggcacctatagttatatgtgttagagaaaatgttatatgccaattaaaaacgttaactgtcctatatttttagcgcaaaaaaaatttcttatgtagattgcttttatagtagaagtaccaaccaccttatatttctcaaacggacgattttccgttatttattctgagataatataggcttatttatcaattaattacattatattttggagtttacattatgattaatgacatgcatccttctttaattaaagataaagatatagtagatgacgtaatgctacgtagctgtaaaatcattgcaatgaaagttatgccagacaaagttatgcaagttatggtgactgtattaatgcatgatggcgtatgtgaagaaatgcttttgaaatggaatctgctagacaatagaggcatggcgatttataaagttctgatggaagcgctttgcgctaagaaagatgtgaaaattagcaccgtaggaaaagtaggtcctctcggctgcgattacattaattgcgtagaaatctctatgtaaaataattgattgttgaaatgcttgagccaaataatagactcctaatagagactcaatctgattaaagcgatctcattgatcgcaaaatacagtactgttgtgataggaatttggcacaacatttctctggtataatgaagctgacttttatataccctatggatttcaagatgcatcgcggcggcaagggagtgaatccccgggagcatagataactatgtgaccggggtgagcgagtgcagccaacaaagaggcaacttgaaggataacgggtataacggcacattctaccctatctaaggcagagcgtaatattaacgctctgcctgccataactacatttaataaaaaaaacagaaaatcataaaaataatataaaacaaactttcaataaattaaaatcaattaaccaggttatctatttcacataaaaatatcaataaattattatcaaaattcaatttcactcaaaaaatttcttttaggaattatttttaataatagcacataccatccgctcaatctttaaaaacagggtagaacaacgcctctttattgcacacagtgaatacttaacaacatatgtaattacatcaataatatttccatattgtaattattaattaaatatcatacacccaggtattattaaatctaaaatagatttaaataaattaatttcagagattgcagtcatatatctccatgcaagatactataggataagaataatttcataatgttttatttaaatatcaactagaaaattaaaatttaaatcattcaccacatactgctagtacgcttcaattcctgccgcccattccgtacccatactctattaataagaatatcctgcataaataatacttactggaacagattgttaatttctcaatttcaacaacaggaaataaatatcaatattattttttgattagagtgatacatttgattattataaccatttagaggaaatatattattggcgactttttaacagcatcaataattatataatatagataaacttttaatatagattacaattaccaattaccttatatttcttcggcggacaaatgactgctccgtacattttagtaaagaattctatttttcaattacgttaaattaaaaggttaacacgatgaactatacaaatccttcttctaatgaagtggtaacagaaaataaacctgaacagacttctccaaaccctaattactattttgcggttggtacagtaacttcagttcaggctgcacctgatcaaaaccaattgcaagtgactgtcactatgcaattccctaacggcaaatttaactatctgttatggtggaatgctcaggactacagaggtgcagcactgtatcatcttcttctgagcgcttgcagtagtaacaaacgtgtaaatataacttcttcatcagcggtttctcctggtggttacaattatatctacaacgcaacattattggcttcttaagataaagtcataaattgttaaatagctccacctaattccttattgttaaaatataaattgggtatagcatttatctggtagaataaagctaatgttgagtaaaagctaaaaacattttctaccatatactcccctctctaggtagaaccttaaccacagggttctgcctgttctcgcaacaccgttttaaattcacggtaattaataaataacaccttatttcaataatgctattttaatgtcatcaatctatatttaatgactttaaacattatttcaaatagaaaataaaaacctacaaaaataataaaaagacaataatagccctaaaattaaccacaataaatttattgatcatacatttaacacctcaataacaacgtattaaaacaattgtattaaatatatttttgaacgttactattttaatttatcaaaaattatcctcctatctaatattacctgtaaaataataaaaaacccaattaaagcccattttcttgacaaatatcaataacgcttactactatttttaatacttgaatatctatttctctcactcacttctcttcataataggtgataaaatgtcagaagaaagccaacgtattaaaaagccatcctcaggttatgcaacagatcatttctacgatggagcatggcatagggcggtcaaatttgttgagggcagtgttgaattttttgatgtttacgatgttatctttgaggggattacttaccaatccccaccaatcttagtttctgagaacctcattattgttcccatagcaaaagatgaagttgcctggaacagtaaaatagaaatatatggcgctatcggcactggggaaagtgaaaaaattttttctgacggtgatgccgtccgaccttttgccggtgaacttgatgtttcaaatcctcaggaacctcttgttattttcggcggaggcaatgttagtcgttttcccaattacacagccaatgtcaatggggttgaatatggtggtttaattatagatccagaaaagaattcaatatccttattacgctccatcgaagatggaaaactaatggtatttggcaaaactgaaactggcaaaaatgtcattgtttttgaaatagaaactgaaggtgaaaataaaccacttaacggatgggtagagtttcatgacgtagcaacctgtattctattcagaaatggcgatttaacaggattcgctactagctatgaactccgatatgaaggaacatcaacccgcaactatcgaggtttatcaccgacgcatattcgttacgaaaatatcggccatcatgttaaaactgaggtcgaattatgggcttactggcaagataaacctgatggtgtcttgttattcaaaggccggtacaacggatctgttgtaaaaaatagcaaatgttgctctttagatgaaaaaaaataggtatatacccaatggatttcaagatgcatcgcgacggcaagggagcgaatccccgggagcatagataacgatgtgaccggggtgagtgagtgcagccaacaaagaggcaacttgaaggataacgggtataaagcgtgcgcggcaaaatgccgcgccctaaatcaaaaaaatataacgccacccaacctaccacataaaccttatattgatgtcaaatcaaccaaaaatcgccttaaaccaaccactcactttcatcacaatcaaatcccaaatacggctaaaaaagctaccttcctctaccgcctctttaaccaccaaagggcgttgttcaattaccttatcccctaattggaaattaatcacaccaacaacctgatttttcgtcaaaggcgctgttaatggagtttgatttaatgtgtaactggctttcagattttttaactgcccacgaggaatggtgatcgcagcatctttttccacgccaagagcaacatctgagcgcccgccataccaaaccttttgcgaaacaaacggctcgctagctttaatgggcgtcactgtttcataaaaacggagtccccatgcaagtaatttttcactttcaacgaaacgaatccgatcacttggtgctcctagcacaacagaaatcagccgcatgggtccctctgtcgctgaagcaactaagttataaccggcaccgctggtatatcctgttttcacaccatcgacattcatattcttattccacaacaatcggttacggttaggctgttggattttattaaaggtgaatgttttctctttatgcagagcatactcatcaggaacatcacggatcatggcctgactcaataccgccatatcacgagcagtactgaattggccctcagcatccaatccatgaaccgtacgaaaatgggtgttagtcaacccaagtgcttttgcataattattcatcagactaacaaatacatcctgactacccgccacataatcagctaaagcaatgctggcatcattaccagactgaacaacaacaccatgattcagatcaatcacttttaccctgtcaccgggtttaagaaacatgagagaagaacctttcagtatgggatttcccgtcgcccaagcatcttttcccacagtaacaatatcttccggcgtgatttttcccgcttttatcgcctgaccgacaacataactggtcataatttttgtcagactggctggatcaagccgctcatcgggattacctgccgccagaattttaccgctgtcataatccattaacacataagctctcgcatccactggcggaacgacaggttcatccgatgcataaacacgggcacttaccattgatgccactgtcagcaccgcaacaacacattttatcgccatcgccaaatttttcttcatcatcgttcccctttacttaataagaaaaaatgtcaaattcttataccctatggatttcaagatgcatcgcggcggcaagggagcgaatccccgggagcatagataacaatgtgaccggggtgagtgagtgcagccaacaaaggagcaacttgaaaaatgacaggtatattaatataaaatgttgtacgacaagaaaccaacataaataggataaagattgtgctgatcattagttttcatttaatctgatagcggttataccttatggatttcaagatgcatcgcgacggcaagggagtgaatccccgggagcatagataactatgtgaccggggtgaacgagtgcagccaacaaagaggcaacttgaaagatgacgggtatattggtaacaaatagacaattttcttatcatcccgattccaggaaaaactcatgctgaccatttggggccgtaaaaactcttccaatgtaaaaaaagtgctctggtgtctgaaggaactcgatataccgtataatcaagtagatattggcggtaaatttggcaaactggatgccccacaatatctgaaaatgaatccaaatggaaaaatcccttgtttacaagaaggcgattttatcttgtgggaatctaacgcaattgttcgttatcttgcagcaaaatttggtaaagaggtactttatccacaagacctacaggaaagagcaaatgcagataaatggatggattgggttgcttcacatctgtttcctcatatcagacaactcatgataggttttattcgcacacctgaaacagagcgggatcaaaaacaaatagaacaaaccttggctgaaatcgaaaaattgatgaaagtgctcgatgacaccctggcagaacagaaatatctttctggcgataaatttggcatggctgatattgcattaggacccatgatttatccttggcttaatattccaatcaaacgaccatttctgccaaatattgaacgctggtatcagttaatggcagaaagaccagcgttcaaaaaaattgtcatgattgagttaagttgagaaaaatcagctcattggcatccatccaggatcggggtattgatacttaaatcccaactcctgacaaatacggctaccatcaacaattctgcttcccatctgagtctcttctctgaaaaactcaggtggaactaaatcaagctgattactggctttagggtaaaattcagctttggttgggtgaacaggcgcacataaattataaatatgcccaccttcagtcctctgaattaataaattaatggctgaaataacatcatcctgatgaactaaattaaccggctgattccctcctttaactcccttttttcccgccagaaaacgcccggcatgacgaccactgccgaccaaaccggctaaacgcaaaatatcaacagaaatatttggcagtttgtgcaaccaattctctaattcaaccaatgcctgagcagaacgtgtttcagggcaaaaaggcgcatcttcattgagattgcccgcaacaaaaccataaacagaagtagaactggtgaaaataatccttggcacagagtatgagagagcagtatcgacaattaactgaactgccctaacatagttataactgccacccgcagtgtggcttgccggtaaagtgatgatcagcacatcagctaccatcagttgctctaaatcatcaagcgcgcaattgatctgaggttccagttgtaacaaataacattcgataccagacatacgtgctgcctctacaccatctggcgtcgttttgctgccaacaacctgcataccactgcgactcaatgctttggctaatggcatccccaaccaacccagaccgataatggaaacttttttcatcaccaccccttctatgcctgatattactttgattatgcaaacaatccgaacattaagccactgttattattgatactgtatttctcccatagaaaacaatatttcaagtaaaaacaaaatattattacaatataaatttactgttaaaaaaatagattgcttttagtccatcaaatcgtataggttgaatagcaagcaaaaaatttaatctctgttggtcagtgaataaaagcaactggcagcaataacaaataaagagaaaccattatgatccgcattcaatttagccattaccaccatcatcatcctgattagtctttcaggcggttgtgtgctggaagacgtttaacgggtcttccggtggcatgaatgcgataaaaacccccggaaggatccttccgggggtttttttatgtttccgattttaagtggggataaaaatgttagataaatcacgtttacgtatcgcaatgcagaaatcaggccgattaagcgaagattcacaagaattactggctcgctgtggtattaaaattaatctgcaacaacagcgcctaattgcattcgcggaaaatatgccaattgatatcttgcgggtacgtgatgacgatattccagggttggttatggatggcgtcgtcgatctggggattatcggtgaaaatgtgctggaagaggagctattaagccgtcgcgctcaaggagaaaatcctcgttatttcaccttacgccgtctggatttcggtacttgtcacctttcactggccgcgcctctagactacaactataccggcgtcgaatgtttacaaaatgcccgtatcgcaacctcttaccctcacctgctaaaacgttatctcgatcagaaaaaaatcctctttaaatcctgtctgctcaatggctcagttgaagttgctccccgtgccgggttagccgatgccatctgtgatctggtttcaactggcgcaacactggaagcaaatggtctgcgggaagtagaaattatctaccgttccaaagcctgtcttattcaacgtgatggtgaaatgcccgccgataaacagcaattgattgagaaactgttgacccgcattcagggggtgattcaggcccgtgaatccaaatacatcatgttgcacgcaccaagtgcaaaactcgaagaagtgattgctctgctaccaggggcggaacgtccaacgattctaccgctggtgggagatcagaaccgcgttgccatgcatatggtaagcagtgaaacactgttttgggaaacgatggagaaacttaaagcccttggtgccagctccattttagtattgccgattgaaaagatgatggagtaaacgaaaatgactgaccatttcgataccctgatccgttggcaggagtgccatgatgaacagcaaaacgctttactgacacgccctgcaatttcagcttccgtagaaatctcccgtacagtggagcaaattctgcatgcggtgaaagagtatggcgatcacactctgcgtgaattcagccgccgtttcgacaaaacggttattgaaaatatccgtatttcgccggaagagatagccgccgcagaaaacagtctgaataatgacattaaacaggcaatgcagcaggcaatgaataatatccgcgttttccacgaagcgcagaagccgataaagatcgaagtagaaacccaaccaggagtctattgtcaacaagtaacacggcctattgattcggttgggctttatatccccggaggttctgcaccattactttctaccgttttgatgctcggaacacctgctcaaatagcgggctgccataaagttgtactttgttctccaccaccgattgccaatgaaatcctctatgcagccacactgtgtggaattacggaaatattccaaattggtggcgctcaagccattgccgctatggcatttggaacagaatccgtccccaaagtagataagatttttggtccgggtaacgcttatgttaccgaagccaaaagacaagttagtcagcgcgtagatggtgccaccatcgatatgcctgctggcccatcggaactgcttattatcgccgatgcgggagcaaaccccgtctttgtagctgccgatttactctcacaagcagaacatggccctgactcacaagtgatattggttacacctgatgaagcgttagccaaaaaagtgataacggaaatcgaaaaacagcttacccgtcttccccgcaaccagattgccgccaaggcattagcacatagccggattattgtgacaacaagcctgcaacaatgcgtagaaatcagcaaccgctatggcccagagcacctgattatccaaacccgccagccagaacaactggttgaaaaaatcactagcgccggttctgttttcctcggtgactggtcgccagaatctgcgggagattacgcatcaggaaccaatcacgtattaccaacttatggctacacttcaacctattccagccttggtctggcagatttcctaaaacgtatgacaattcaacaactgacgccgcaaggactactgaacctatctcagaccattgaaacactggcgcaagcagaacaactgaccgctcataaaaacgcgctcactttacgtgtggcggcgctgaatattgccggtcaaggggtgaatatgaataacattttcgatgccaatctgttggcacgagaaaatatccgcaaattaacaccttatatgtctgctcgtcgccttggcggcaagggtgatgtttggttgaatgccaacgaatacccactagcccctgatttccaatgcactgagcaaacattaaaccgttatcctgactgccagccagcctcggttatccgccgttatgccgcctatgcaggcttacaacctgagcaagtactagcctgccgtggtgctgatgaatccattgaacttttaatccgcgtattttgtgaacccggacaagatgtagtgctgttttgccctccgacttatggtatgtacagtgtcagcgctgaaacttttggtgtcgaacaaaagaaaattaccgcactggaaaattggcaactggatatcgaagcgatcgaaaataacctcgaccgggtaaaattaatctatatctgtagccctaataacccaacaggaaacgcaataaatcctgattcattgcgtaaaattctggaactaaccgccaatcgtgccattgtcactatcgatgaagcctatattgaattttgcccggaaaatagtatcgcaagctggctaaaaaactatccaaatttagtcattttgcgaaccctctcgaaagcttttgctttagccggtctacgctgtggatttactctcgcatctgtggatatcatcactctattgttaaaagtgattgcaccttacccgctttccacgcctgttgcagatattgcagcacaggcactgacagcagaaaatatcgcaattatgcaaaaacgtgtcgttgagatcagggaaaaccgcaatgacttgcaacaggcgctgaataaattagccatcgtagaaaaagtattccccagtgaaaccaactatatattggtgaaattctatgacgcagaaactgttttcaaaacattatggcatcagggcatcatcctgcgcgaccaacgcaaacagcccggtttagagggttgcctgcggatcaccatcggcagccgtaaagagtgtgagcgagtggttgaagccatcagcgccctttccactgtaaatgaacaaccaaaggagatagcaaactgatgaaccagaaactcctgtttattgatcgggacggtacgctgatcactgaaccgccaacagattttcaagttgatcgtctggataaactggcactggaaaccgaggttattcctgctctgcttgccctgcaaaaatcggggttcaggctgattatgatcactaatcaggatggtcttggcacagatagttttccattagaacaatttgaaccgccacataacctgatgatgcagattttcagttctcaaggcatccattttgatgaagttttaatctgccctcacaagccagaagagaactgtcattgccgtaagccaaaaataaaactggtggaaaaatatctaacagaaggcttgatggataccgcgaacagctatgtgattggtgaccgggaaaccgatctgcaactggccaaaaatatgggcattcaggggttacattatcatccgaaaaaccttggctggttcgctatctgtgaacaactaacccgtcaagaccgtcacgctcatgttcaacgtatcactaaagagacatccatcaacattgacgtttggcttgatcatgaaggtagcagcgatatcaataccggtgtcgggttctttgaccatatgttggatcagattgctacccacggtggtttccgcatgcatgttcaggttaaaggcgatctctgtattgatgatcaccataccgttgaggataccggtctggcattgggggaagcattgaaactggcgttgggagataaacggggcatttgccgttttggttttgtgttgccaatggatgaatgccttgcccgctgtgctctcgatatttctggtcgccctcatctggaatataaagctgaattcaaacaccagcgggtgggtgatctgagcactgaaatgattgagcacttctttcgttcactctcttatgcaatggcctgtacactacatctgaaaacgaaaggcagcaacgatcatcacagagcagaaagcctatttaaagcctttggccgaacactacgtcaggcaattcgggtagaaggcgatacattgccaagttccaaaggggttctgtgatgaaagttgtcattcttgatactggctgcgctaacttgtcatcggtaacttatgccatccgaaaattaggctatcaacctgaaatcagtcaggaaacagcaacgatcctggcagcagataaactacttttacctggtgtcggcactgccagtgccgcaatggatcaattgaaacaacgggaacttataccgttaattaaagtactcagccaacctgtgttaggtatttgccttggcatgcagctattcgctgccaccagcgaagaaagcgataatgttgcaggtaataatgtcaccctactcgaagttatggcttcccccgtccaaaaaatggctacgcatgggcttccattaccacacatgggctggaaccaagttctgccaaaagccgggcacccgctattccgtggtattgaagaccatgcctatttttattttgtccatagctacgcgatcccgctgaatacctacaccattgcgcaaactgaatatggcaatattttcagcagcgcaatcgccaaagataacttcttcggcgtacagtttcaccctgaacgttccggtgctgccggagccagactattaaagaattttctggagatgtaggcacaatgattatacccgcattagatttgatagatggcaaagtagtacggttacatcaaggggattatgctcaacaacgggattatcaacacgatcctttgtcccactttcaacaatatgaacaacagggagcaaaattgctccatctggtcgacctgaccggcgctaaagatccatccgcccgccagatccctttactgcgcaaattacttgcagcagtttctatacctgttcaggtcggcggcggcatccgtacagaagaagatgtgaaaacattgcttgatgcgggtgccaaccggatagtgattggctctatcgccataaaacaaccggcactcgttacccaatggtttaaacgttatggtgccgaaaatattgtgctggcgctggatgttcgtatcaatgatacaggcatgaaacaggttgccatcaatggctggcaggagaattcctccgtcactctggaacaggttattgagcaatatctgccttgcgggttgaaatatgtactgtgtacagatatctcccgcgatggcacgctaactggttcaaatgtcgaattatatcgggcaatttgccaatactatccacaaatcgtatttcaggcttcggggggcatcggcacgttaaatgatatcgcttctctgcctaccagcggtgtagccggggttattattggtcgtgcattacttgatgagaaatttaccctgaaggaggcaattcaatgctggcaaaacgcataattccttgccttgatgttcgtgacgggcaagtggttaaaggcattcagtttcgtcatcacgaaattatcggcgatattgtgccacttgcccaacgttatgcaacagaaggtgcagatgaactggttttctacgatatcactgcctcatctgatggacgggtagtcgataaaagttggatcaccaaagttgcggaggtgattgatattcccttttgtgtcgctggtggtattaaaactgtcgaagatgcagggcaaatcctttcatttggggcagataaaatctctatcaactcccctgcactgactgatccaaccttaattactcgtttggccgatcgttatggtgttcaatgcattgtcgtagggattgacacctggtttgatgaaagtacaggtcgctatcaagtttatcagtttaccggcgacgaaaaacgcacaaaggccactcaatggcaaaccctcaattgggtaaaagaagcgcaacaccgtggtgcaggtgaaatcgtactcaatatgatgaatcaggatggtgtccgcaatggctacgatctgactcaactaaaacaggtgcgtgacgtttgtcatgttcctctcattgcctctggtggtgcaggcgcaccagaacactttcttgatgcctttaaacaggcaaatgtcgatggtgcactcgctgcatctgtattccataaacacattattaatatctgtgaattaaaacagtacctttcacaacaaggcgtggagataagaacttgctaaccgcacaacaaatcgaaaaactggattgggaaaaagtcgcttatatgatgccggttattgtgcaacatgctatatccggcgatgtcctcatgatgggctatatgaataaagaagcactgaatattactatcagttcaggcaaaatcactttcttttcccgcagtaaacaacgtctatggaccaaaggtgaaagctccggccattttcttaatttggtcaatatctatcctgattgtgacaacgataccctgttggcactcgcagacccaatcggccctacctgccactttggtacacacagttgttttgctccggcacaaactgaatggggatttctctatcagcttgaaaaattgctggcaagtcgcaaaacagccgaccctgaccattcatatacagcgaagttatatgccagcggtactaaacgaatcgctcaaaaagtgggtgaagaagggttagaaaccgctttagccgcggcagtgaataatagagaagagctaacgaatgaagcagcagatctgatgtatcacctgatggttctactacaggatcaagagctggatctgagttgtgtcattcgtcgattacgggaaagatgatatacccgtcatctttcaagctgcctctttgttggctgcactccctccccccggtcacatagtttgctatgctcccggggattcgctcccttgccgccgcgatgcaacttgaaatccattgggtatatgcccgtgatccaccgcgcttttccggtagataaaaaggcaaaaaccaatcatacgaaaaacgactatcaggcgacatagacgtctacgtcgcctttttgacagctccccgcccaattaggcataggtatctacacgaaatgaacgtttataaatcacatggccgctttaaagatcgaaacaatttcttcatgggtagcttgagtgggattagtcaaacaacatatatctttcaaggcattagttgctaactctggtaaatcttctaatttgacattcagttccgctagacccgacggaataccaatatcttttgacaacttacgaatttcagcaatacatgccgcagccccttgctgatcattcatagcgcttacatctacccccatcgcagcggcaatatctttcaaacgacccgcaaccgctttagcgttgaactcttgaacgtgtggtaataaaacagcattgcatatgccgtgtggtaaatcataagtaccgcccaattggtgagacatggcgtgtacataccccagtaatgcactattaaacgccatccccgccaagaattgtgcataggccatgttttcacgtgcttctatattgctcccatctgcaactgcttggcgtaaagagtgactaatcattgagattgctttcaatgcacaagcatccgttattgggctagccgcaggagaaacataggcttcaaccgcatgagtcattgcatccattccagttgcggcggttaaccctttcggcattcctaccattaattccggatcgttcacagacaaaacaggtgttattttcttgtcagcaatggccattttaatatggctttcagtatcggtaataacacagaaacgtgacatttctgacgcagtacccgcggtagtattgactgagattaatggcaaatgcggtttagatgaacggccaataccgacataatcccggatatcgcctccattagcagcgaccaacacaatagcttttgcacaatcatgtggcgaaccaccccctaaagaaataacgcaatcgctattatgctgacgcagaatatccaaaccttcctcaacgttaattgtcgtcggattcggattagtaccatcataaaccgtactctcaatatcaacatcagataataaagcttgaacttttgctgccaccccaatttcatttaaaacacgatcggtcacaatcaatgctcgcttataaccatcacctttcatcgtatttaccgcttcaaccaaacaacccgcaccaaacatatttaccgatgtcataaaaaaagtcgtagtcatcattgataattccttatattaaaatagttttagaatgaaaatatatatacccgttgtctttcaagttacctctttgttggtttcactcactcaccccggtcacatcgttatctatgctcccggggattcgctcccttgccgtcgcgatccatcttgaaatccttaaggtataaaaagtaaaatttgaaaaatcacctaatggaactacagatcattgctcttgcaacaaacataaataatagctctatttaaaccacataattcaaaaaatataaatatatctcggtagagttagataaggtttattaaaatagatatttgataattttccctcttggtaatatattccattggcaatataataaatacaataatcgagaagattaatatatcaattcaccaaattattacttaggagtttattttgtcctctaacgaaatatttaaccgcctgaccacattactggataatcatcatgccagctatcgggtgatggaacattcaaccgccggacattctgaagaagttgcaaaaatccgtggtacacaacttgggcaaggggcaaaagggttagtttgccatgttaaaggggaaggattccgtcaatatgtactcgctgtactgcctgcggatcaacaagcagacctctcttcactggcaaaacagatcggtggcaaccgtgcctcactggcaagtcctaaagaagtttttgaactgactcaatgtgtatttggtgctattccaccttttagttttcatccagatctgaaactggttgcagaccctttattatttgaacgttttgatgaactggcttttaatgccggcagccttgaacgttcagtgattcttaacacccaagattaccaccgaattgcacaacctgaattgatgatttttcgtcgagtagaataaataccatcgcgaaaaatgatatttgtcaaatagcctataaaaataggctatttaagataatattttaaatatactcatttaaaatagtaactatcccgccccaataagtttatacccgtcatttttcaagcggcctctttgttggctgcactcgctcaccccggtcacatcgttatctatgctcccgggaattcgttcccttgccgtcgcgatgcaacttgaaattcatagggtatatatcactagataaagttattattgctacattatacaaacattaaacagagaggtataattatcaaataccatgaatatctaattattcactattgaggcatatacaaaaaattaccaattacattatgggataattccctacccaaacaaaggtgtttcttgataggaattttcaattatttttaatttcagaacctttatttcaaatatcggtgaaaaatgacatgtcaattatattaatgttgtattgacaacaatttcatatgcctattcattatattttattaaatacaaaaacccacactcattgtattctcatatcgctttcaaaaagaaagatgacgttttttcaaaataaattttaaggaatagaaaagtatgactaataagctagttacaggtgcaacttttttcgatagaaaatactttctgggtgaagcgcaccattatccagaaaacgacatcattattccattgccttatgatcttaacgatagattccgttcagtaagaattggaacgctatcaaaagtttatgcatggcgtcatcagagcgattgggaacccggccaacgctatcgtgaatgggaatacgatcatccagatattgatagagaaattagaggattatctaagtttaaagtggcaccaaaagatacctgtctggttgcattaagacttattgatgatacttattcaggtattaaattctcaatgttcacgaatacacattgcgtgggcccagttgaaacaacaactgatgatgattatgcactggttggtatactgccatttgagaccgagttagttactgccattgcaataagaaataccagtactggagtatatatcaataacggatcattctatttctatcgtgatgcgaacggcgttgttactattgatgagaaagctaatttccctaaaaatctcagaatagttaatgtaggtggcaatcgttttgatattcatattatcagtaccgatttttctaactaatccggttataatgtaacaataattaaccgccgttttcagacaagctacgttctgaaaatttaaacaacaccgttgcggaatatcatcaaaaaccgcaacggtgtattcataaatcagcaaaaatttcgtggcgataaataattttttatttattatgatataagcatcattacaatagtcacttaacctttaaaaagaacattaaattaaggtccattagaaataatgttcacaagctatttcctttgagataaatacttccctaacgattaattttgaaaattatagtaaaacccaaccattccattattacatatcttattttaggtaattaggtatttttaaacaactttactttatgtatttttatgctaattttaacattaacccatcgaatattattcttctattgactggatatattacatctaaagatgaggaataaataaattattagtgggaaatattacacaaaaaaagccaatttttacaaatagtatataaatcatattctgaaatttaagctacgccgttgcggtcatttgttagaaaagccgcaacgacgtgttccagaagatcgcagaaattaaaaccacatcatatctgatgtaaactctccactctgctggtcaatcggtgataaccgggcttactccatccattcagtatggaaaacaccttctttatcagtacgcttataggtatgagcaccaaaataatcacgctgagcctgaattaaattagcaggcagtaccgctgaacgataactatcgtagtaagaaatagcagcagagaaagtcggggttgggataccattctgcaccccatacgagacgacatcacgcaacgcctgctgatattcatcagcaattttcttaaagtaaggtgccaacaacaggttagcaatatccacattttcgttatacgcgtcagtaattttttgcaggaattgagcacgaataatacaacccgcccggaaaattccagcaatctcaccgtaattgagatcccactggtactcatcagatgccgctttcaattgctgaaaaccttgggcataagagacgattttacccaaataaagcgcacggcggactttctcaataaattcggccttatcacctttaaatggttgtacatccggcccgctcaaaacttgagccgcagcaactcgctgatctttcagagaagagatataacgtgcaaataccgattctgtgatcaacgtcactggaatccctaaatccagagagctctggctggtccacttacccgtacctttatttgctgcttcatccaaaatcacatcaaccaaatattggcctgcttcatctttcttatggaaaatatcagccgtgatttcaatcaaataactgctcaattcgccgttattccagtcagtgaaaatctcagatagttcttcattgctcagatttagggcatttttcagtaaagaataagcttcagcaatgagctgcatatcaccgtattcaataccattgtgaaccattttcacataatgaccggcaccatccgggccaatataggccacacaaggttcaccttcagctttagccgcaatctcttgcagaattggtgccaccaatttatacgcctctttctggccgccaggcataatagatggacctttcaatgccccctcttcaccaccggaaaccccagtaccgataaaattaaaaccctgagcagaaagctcgcgattacgacggatagtatcctgaaaataggtattacccccatcaatcaaaatatcacctttatccagatgtggagtcagtgaagcaatagttttatcggttgcttcgccagccttaaccatgagcagaatacggcgcggtttttccagtgaatcgacaaattcttcgacagtgtaacttggaactaatttcttccccggattttcggcgatcacttcgtcagttttatcacttgaacggttaaatatagatacggaataaccacggctctcaatatttaatgccaggttacgccccatcaccgccataccgacaacaccaatctgctgcttggacatgaataactcctgtctgatgataattctgctcaccaataataattagcgcgcaatttgttaatgtgatcacatgttaactcaggacgagtcctaatggatagttattggtgccatcaataccgcgacaccccattttttggaaaaaacttcctcagatgaaaaatcaactattgaaatttgatgagtcaatgcccattattcattattcggcatgagccgtcatattaaaaggtaaaacaaactgtatggaatggatcgctgatccgacgatatgggctgggctagttactcttatcgttctagaaattgtcctcggaattgacaacttggtctttattgccattctggcagataaacttcctgaaaaacaaagagacaaagcaagaattacaggtctaggttgtgcgttactgatgcgtatcgtactgctttttagtctttcctggttgataacgctaactcatccattaattacgctttgggaacatccatttagtgcccgtgacctgattatgctaataggtggtcttttcttactgttcaaagcgacaatggagctcaatgaacggctggaaggtaaagatgcccactcaggacaacaacgtaaaacatctaaattttggacggttgtcgttcagataattgtccttgacgctgtattctcactggattcagtggtgactgctgttggtatggtagacaacatcggtatcatgatcgcggccgtcaccattgcgatgttcctgatgatactggcaagtaaaccgttgaccactttcgtcaatgctcacccgactatcgttattctctgtctgagcttcttgttaatgatcggtttcagtctggtcgccgaaggttttggttatcatatccccaaaggttacttgtacgccgctatcggcttctccattatgattgaagccttaaaccaatttgctcaatttaaccgccgcagatttcttactgcttcccgttcactacgtgaaagaacagcggaagccgttttacgtatcctgagtggtaagcatgaaaatgcagaattggataatcatacatctaatctgatttctgataatcaggaagtgtttgatccacaagaacgtcaaatgattgccagggttctaggcatggcgcagcgtaacgttaacagtatcatgacttcccgtcacgacgtggagtaccttgatattcatgcaccaactgaaaatctgacgcaaatactgaataaaaatcctcacacacgcattgtggtaactgatgaaaatatcagtgacgaaccattaggtgttgtccatgttattgatctactgaatcaacaactcaaccaacagccttttgatttacattcgctgataaaacagcctctgattttccctgaacagctttcactactccaggcattggagcagttccgccaggcacaaactcacttcgcgtttgttgtcgatgaatttggttctgtggaaggtgtggtgactttgaccgacgtaatggaaactatcgcgggtaatttaccggtagatggcgaagaaactgatgcccgccatgatattcaagcgactgaacatgggggttggatcgccaatggttatatgccgctggatgatttgatcctttatgtccctttgcaactggatgaaaaacgtgaatatcaaaccttagcaggtttgttaatggaacattcacaacatattccacggcaaggtgagcaattacagattgataattatctgtttgaaccgttggaagtaaccagtcaccgaattaataaggtaaaaattacccctctggtgtcaaatgaagaaaataaaaaataactcagtgttattgatgactcatcatatttgtcatcactgagtttttcctctgaaacaaaataaaacccggtcagtttaaactgtaccgggatttttttaatcttttctattaatgccatatgcggaattctatgcggatacggttaaatgatttatctatacccgtcatctttcaagttgcctctttgttggctgcactcactcaccccggtcacatagttatctatgctcccggggattcattcctttgccgccgcgatgcatcttgaaatccatagggtataactagattaaataattttatattcagaacagaaaagccatagcttctcaattcaattatcaaaatttaatccacaagttgaaatccacctttgtactgaaattgactgctcaaacaactatgctcagacaacgataagcattcatttaagcataatagtcaactgccggattgagcggtcaaatcaggcatgagttattaatacagctaattactgctgcgttcaacccaatcgttaatagcctgttttaccttgttctctaactcattatgtagcaattgctcaatatccaagttgtattgcagattactccaattaccgtaaacccgcagtggtactttcatttttcgcagacgactaaccaattcattatccttgccccatccttgtgttatctgtacttttaaagcgacatcaacatcttgtttaagcagattagtcttaccctgcccatcaatattcagcaaatcggataccgcatgcaatcgactgatttttatatcacctcgattcagtaccgctttaacatcaagctttttagcgcgggtgaaattatccatattatcagggatattcactttatccgttgcacgagcaacggattgctggattaattgggggatatttaatccatacattttggcattaactaaactgaaattaagatcaccctgccaaatatgcgaaatcgcataaccatcatatcctttaccagaaagatccccattcagatcgaatttgccactaaatgccggaggtaaggaaaaggctttgagtactggttccagttctatattccgcagtaaaggttttgcgtgtaacttaagttgattacccgttgcatctaaaataaccggaatagagaaatcaccaccaaataatttgccattcagagtagaaatttcagcaataccactattatttgtcgctttcaatatcagattatcgatctccattcctcgataaacaaatttgtccgcattaatagtcacattggcgttaaagtcattcagaaatgcagcgctataatcaggctcggcagagcttgaaacggcgattaccggtttagctgaactattctctatccggtaataacgtttaacttctgaaccctctttaggaagcaagtcccatcccatcagattatctaaattcagtttttgggaagataaatcgatccgataatccgcatgagcccccaacattgcttttatactgccatgcagttcactctcattagcggtgaaacttagcgcctgtaaagaaattgtttgcagttcatctgtcgtctctttttgataaacagcatgtacttttcctgaaccactaattcctcccgtaggtatacctgcgccctggagttgataatcaaagaagtcaatattacccgcaacacgatatggataatcagtaatatcgacatctgcattaagattaaaagccaagtcttgctgattcttactgactttgctacttaactctacgctgatatggttttggttatctcgctccattagcagattaatatcgcggacatttaactgctcatgatcatctcgctgccaaataagcaaactatccgcgatcttaactctggcaatatcaagctcccaaccctcccccttcgcaacaggattggctgtactccctgttggtgcaataggggtattcccttttttctgcgactggctctccggggttactctcaatatcgcccctttcagcatcacctctttaacggcaagctgatgagaaagaagcggccacaacgccacatcaagacgcatattttctgccatcactgttggctgcgccgcccctggggccgttaatgacatacgcccggtaatgatgctcaattttggccagacatgccagcgcataccatcttgcaggacgagttggtagccactcttcttttgcacctgcttgaccatataagcccgaaagtcatttgggtttactaacatgactaatgctgccagaccggtaataatcacaaccagcaaaataatcagtgttgtcagcaatctcttcatgacttcctcagctttttttgtcaaaacagtcaatgcagctcaatagccgataaagatgttaatcttcatcaatacgactactcaccgcaccctgttggtttttatatttcgcatcttgacgacggttatacggacggtcagcggaaccagacaatggttcaaaactcaaagcaccgatgaccatacccggacgtaacgccagaggcaatttaccagagttatagaattcaagaacaatttgaccatgccagcccggatcaatccggtgtgccgtcacgtgcaccatcaacccaagacgagcaagcgaagaacggccatcaagccagcccaccaaatcatccggcaatgtgacagactccagcgtaacggccagtgccaactcgccaggatggaggaaaaaaacctcatcgtcaggcagaattatttcatcactcatcacacgatcaagcgcagcactgacctcatctttcggaccactcaaatcaatatatgccgcagtatgaccacagaaaacacgaaactgattcccaaggcgcacatcagcagttgccccgttaatgcgttcaatcggcggacgtggagcaatgaccaatttaccctcatcaagccatttaataatgtcgcggtcacagagtcgcattatttcctctccaatacgatgctgcttatcaatgcctgacaagcaaagttttattattcgcagaactgaccaattttggctttcaatatatcaattgctactcggtttttacccccgcgcggcacaataatatctgcatattgctttgatggttcaataaattgcaggaacattggacgcacagttttatgatattgctcaatcaccgaatccagagaacgcccccgttcatgcacatcccgcttaatacgacgcataaggcaaatatccagtggcgtatcaacaaaaatagagaagtccatctcctggcgcaagcgcttatcggtcaataatagaataccttccagaataataacccttttcggtgcaaaatgaatcgcttctggtttacgagtatgagcaacataatcgtattgtggtaattcaattgattcacccattttcagcgcttgtaggtgagaaaagagcagattgtgatccattgagcttggatggtcataattagtcttataacgctcttccattgatagatcgctctgatctttataatagcaatcctcgggtataataccgatattgtgatcaccaacctgagcgcgtaattcacgataaagtgtattagcaatgagacttttacctgaggcagatgcaccagaaattcctacaattgtgcactgatatgcttcgtcagccataatagagattaacctgattctagaaaaaaatgggaacaaagcacttatgagtgctaagtttggcgagattatagggagttaatggtatctgttccagtgtaaacaagagaagtctcacttttttcgaggcgtttcgcataaaaaccatgtaacgagggaaatcgaacaagcatatttctccccatacaaaatctccccatacaaaaagcgggcaatgaaaacatccaccacccgttatcttcaatcaaatacctgcattaaacagcacggaacgaaatttctgttggtatcttctcgccttgccaatacatctgtgctgaaatattcgcggcaatttcgcgataaatatcggtaaattcactatcaggattactgataacggttggctcaccacgatcaagatcttcacgcagtgaaatatgcagcgggatttgtcccaataatttacagtgatatttagccgccaatttttctgctccacccgttccaaaaataggttccaggtgaccacagttaccacaaatatgtgtactcatattttcaataatacccagtacaggcaccttcactttctggaacatgacgatgcctttcattgcatcaattaaggcgatatcctgaggcgttgttaccaccagtgcccccgttaccgggatgttttgtgacaaagtgagctgaatatcaccggtccccggtggcatatcgataaccagataatcgagatccggccataatgtatcctgtaacatctgcatcaatgctttactagccattgggccgcgccataccattgcattgtcatctgtgactaaataaccaatcgagttagtggcaaggccatgcgtcataatcggtgccatatgctgcccgtctggggaagttggacgctctttggtggttcccaacatactcggaacagaaggaccgtagatatctgcatccagaataccgacttttgccccctcctgagccaatgccagcgccaggtttacggctgtgctggatttacccaccccacctttacccgagctgacagccaaaatattacggacaccattaattcccggcagatcattagcccgacgtaatgtgctgatatcatggatcaatttccacgctaccgatttcgcaccagttaccgcctgtaattcttccgtggtggccgcttttaacgccttaaaaccgctttgccagacaaacggcatcagtaattcaatgtgcaagacaccatcaagcatcgtgcagtgatgtaacgccttcaatgttgtcaaatcacgttctagtgtcaggtgtgtaaaagtagcaagtatttttgttacctgagatttcagcaggtcaggattggtctgctcgggggattgtgagttcatcccggctcctttaatgattatcattagctaaaaaccatctcgccatcataacagaacccaatgcgttcggataaaattagcgacaaaaacccgcttccggctcactgattcaatttttatccattaacaacctcagaagggtttaggtttcaaggcgcactggataaaactcattaatattaaaccttaccctagcgacaatttttttgatcggttaacatcaaactccctttttcacttattggaagtcagatccttactatgtctcaagtcgcaaaaaaattattggtgacgtgcgcgttgccatatgctaacggtccaatccatctcggtcacatgctggaacatatccaagcagatatttgggtccgttttcagcgaatgcgcggcaaagaggttcactttatctgtgccgatgacgctcatggaaccccaatcatgctgaaagctcagcaaatgggtattgctcctgaagagatgatcgcaacggtgaaccaagagcatcatcaggattttactggcttttcagtgagctatgataactatcactctacgcatagcgaagagaaccaaacgttatcaaccaaaatctatctcgaactgaaaaaaaacggtcatattaagaatcgtactatttctcagttatatgatcctgagaaaaatatgtttctgccggatcgctttgttaaaggtagctgcccgaaatgtaaggcagaagatcagtatggcgataactgtgaagtttgcggttcaacctacagcccaactgaactaatcaacccacgttctgctgtctccggcgcgacgccagaaatgcgtgaaacagagcacttcttcttcgatctgcccgcattcagtgacatgctgcaagcttggacccgctccggtgccttacaggagcaagttgctaacaaaatgcaggaatggtttgaatccggtttacaacagtgggatatcacccgtgacgccccctatttcggttttgaaattcctgatgcgccgggcaaatatttctatgtctggctggatgcgcctatcggctatatgggttctttccaaaacctatgtgataaacgcggaaatctgaactttgatgagttctgggcaaaagattccaccgctgatctgtatcattttatcggtaaagacattgtttatttccacagcctgttctggccggccatgttggaaggcagcggttatcgtaagccaaccaacgtgtttgttcatggctatgtcaccgtcaacggtgcgaagatgtccaaatcccgtggtacttttattaaagccagcacttatttggatcatctggatgcagactgtttgcgttattactatgcagccaaactctcggctcgcattgatgatatcgatctgaatctggaagattttgttcaacgtgttaacagcgatatcgttaataaagttgttaacctggcctcccgtaatgccggcttcattaataaacgctttaacggcaagctggcggataaactggctgatccggcgctttaccaacagtttattgatggggcaaaggtgattgcagaagagtttaataaccgcgaattcagcaaagcaatccgtgaaatcatggcactggctgatttggcaaaccgttatgtggatgagcaagcaccgtgggtggtggcaaaagaagaaggccgtgatgccgatcttcaagctatctgttcaatgggcatcaacctgttccgcgttttgatgactttcctgaaacccgttttgccaagtctggcagaacgcgcagaagcgttcttaaatacagaactcacctggcatggtattgaacagccgctgctggatcatcaagtttctgcctttaaggccctgttcaatcgcattgatatggataaagtggacgctatggttgtggcatctaaagagagcatcaacacaccacaaaaagtcagcggtccactggcagaagatccaattcaggacaccattacctttgatgattttgccaaagttgatatgcgcgtcgcccttattaaacaggctgattttgtcgaaggctcagataagttgctgaaactgatgctggatcttggtggcgaaactcgccaggtattttcgggtattcgctccagttatcctgatccaaaagcactggaaggccgtttaaccattatggttgctaatctggcaccacgcaaaatgcgctttggtatttcggaagggatggttatggccgccggacctggcggaaaagatatctttttactcagccctgacagcggcgcccaacccggtatgcaagtgaaataatagttaatttatttcattaatatttttacccacggggatcagtaatggtccccgctttattttaatgtgagctttgacatccttgtatcttggatttatccagagcatcactttcaacatgccagcgagcaaggcgtgaaagttgccagtaaattagagtcttcatttcaaaatacttgctgcttatcagtagggactattactggggcgactggtatccagcttgtgtcttaagaatcggttttctgggcaaactttttcgttaattgtcgaacaagggccgatagaagatagatctgcacctggattttttagctgttttgtgttgaacaaatcaactaccgtaccttggttttgatcctcttttattggttaattatatgtatatgtgacatggaaaatttccatctccagtatccactttagattttcttcaataaaaagtaagttcaaagtagttaataaaattatcactagttatagtgagataattcagttaaattatcatcgaatttagaatggaattgaagtaaatcaatgtgtaggaaaattattaggaggttagtatggccataccggcatatatatagttgcaagatgatggtggtgcagacattaagggatctgtcgatatacaaaatcgcgagggtagcattgaaatcctgagttttaaccatagtctatatattcccactgatagtagtacaggaaaactaacgggtaccagagtacatggttcaatgagtttcgaaaaagaatttgatcgggcatctccatacctttataaagctgttgccactggacagacgttacaatctgccaatatcaaatggtacagaatagacaatgcaggtcaggaagaggagtatttccatatccttatgagcggagtgaaaattgtttcaatttctccagtaatgcataatataaaagatccatcttatcaacatcttaatcatctagaatccgttgaaatcagatacgagaaaattacgtggaaataccttgacggtaacatcatttactctgattcgtggaaagagcgctaagaaataacgccggaatatccggcattttaccgaagtctattaaagatccgactggcgattttgtgtataattagagctatcattaagagtgcaaagatgtctataaacaattcaatccagctatcctcgtaatttcctcctaaccaacccaaatttatcctattcaggaaacgttctaccacacgatacacctgataaacagccaagtttaacggagtaatgagccggaacgctagcagtgcgatcaacaggcatagtaaataaccaaaaaagctaagaaactttacacgcaccaaaatttgtattccccgtaacatcaactctaccgtatgccatcaatgagctgcccggtactttaaacttatgggtacggagcagagcgtttcgtacgatattaaagtcagaaacacgataaaaggtgatacatccccaagactcgccgctaccattcggacgcaatggatgaagacgaaatgctccgcgtcgaacaccgttcacgaatatataatcattcattgtctgaaaactatataacccaaaccattgagaatgattagtaccatgaatcatatcaagagctgtgcctctgacttggttcgctatgctaccaaccggacgatcaacaatccaatactgacctggaggaattgctgatttctcaatgtaagaacattcagacttgttgacgtatggatcttgaccagagaaaacgtcaaatataccaacgccataacaatgaaatttagcctttcgtccattatcggacaggtcgttataattcatcctacaaatttgcatggttattcccatataatatatctgcgagttgtattccaacccgcaattgattaaattactattttttccatagcgtatgttttcgtatggttggacttcaacgctatcataaagttcacttttttctagaaaacctcatattaaatcaaaccacacattaccaatcttgctaatcattttatcggggctgtaatccagaaccgccgaaatttccgtcatcctttcgaaggaaaagatggcacattcccaaggtcacttgtatgatgaatacctcaccggaattaggaattttgttatgtcgtttcgtgaagtactgattgttggttggcagtatctaagagcatttgttctgatttatttatgtttgctgacaggtaatgccatttcttccctactacctatcattattcccggcagtattatcggtatgttgatcttgttcgttttattagctttccagctaattcctgctcattgggcaaaaccaggctgtagtctgttactaaaaaatatgactttgctgtttctgcctattggcgtaggcgtaatgaattattacgatcaactcagccaacagataattccgattgttttttcatgcctgatcagtactgcaattgttatgattatcgttgcttacagttcccattatgttcatcgtgaacgtccgattgtaggatccacatcagaaattaacaatgaacaacagaaacaagagaaacaagagaaataaaaatgttaagtcacatttggtggtcactgccattaacattgattgtattttacaccgcaagaaaactttcactacgatgcaaaattcccattctgaaccccttattggtttctatcgccgtccttgttccaatattattaataacccacacgccttatgaacactattttgccggcagtcgaattctaaatgatctactccagcccgccgtagttgcactggcatttcctctatatgagcagatacaccagatccgagcccaatggaagtccattattagcatctgttttatcggcagtattgtcgctatggtgacaggcactgctattgccttgtggatgggcgcaacgcctgaaatggccgcttcgatactgcctaaatctgtcacaacaccaatagcaatggcagttgcagatgccattggcggtattcccgcaatcagtgctgcttgcgtcatttttgtcggcattctcggcgcaatatttggtcataacctgttcgatcttttacaggtaaaaaccaaagcatcccgcggcttagcaatgggaacggcatcacatgctttgggtaccgcccgctgtgcagaggtcaatttcgttgaaggcgcatacagctcattggcattgatgacctgcggtatcattacttcactaacagccccttttgtattcccggtgctgctatacctatttagctagtttatctattaggaaatttgataatattcactcgattactaacttcaattacataattctcatcatctatatgatatttatcacattacaaatctcatcagacaacttagaatgatcttaagctacttcggagatcacgctatgcaagctcgttttcaccccatatgggtacagttgccctctaaactacaggatgcacttttaccttacgcaggaaacgatgactttcctgccatgctcactgctgagcaagctaaatcgattaagaaagcctgcggttttgacgataacaccttggctgtcgccctgttaccactcgcagcggccagttccctgacaccaatctcacattttaatgttggtgcaattgcccgcggtgaaagcggaaacctctattttggcgctaatatggaatttgctggcgtaccactacagcaaacgattcatgctgaacaatgtgcgattactcacgcttggttattgggcgagaaaagactggcatctgttactgtgaattactctccgtgcggccactgccgtcaatttatgaatgaacttaatagtggcacacaattagagattcatctgccaaaacaggcatcttcaacattagatcactatctgccagattcttttggcccaaacgatctgggcatcacaactttgttgatggatccggtcaatcatggctataaactagaaacgacggataaattagtactaacggcattagatgcagcaaaccagagctatgccccatacagtaattcctacagtggtaccgcacttctgggaaaagatggaataatttatcctgggcgttatgcagaaaatgcggcatttaacccaagcttgcccccattacaagcagcactgattctgatgaacatttctggtggtgattgcctggctatcgaaagagcggtgttagttgagggaaaacacagtgatttatcccaacggagtgcgactcaatctatacttgctgcactcggttgcagcaaatttgattactacactttctgagttcagtggaaaattcatttttccctctatgcagatagagggttttccgctataaaaaataattaccgtaacattttattatctaactctggatgttataccctatggatttcaagatggatcgcgacggcaagggagcgaatccccgggagcatacctccaattaagtaacatttactgtacatatttttcctatctcttaggatctgtagctaaccttattatccatttagttcaaagagtaagattcatggaactggaacacgaaagtaaacgtccactatatattccctattctggcccaattctgttggaattccccctgctgaataaaggcagcgctttcactgaagaagaacgtaggaactttaatcttcacggtttattaccggaagcggtcgaaaccatcgaagaacaagctgaacgtgcctatcggcaatatcttgatttcaaaaatgatgcagataagcacatttatctgcgaaatattcaggacactaacgaaaccctgttctaccgcctgctggatgcccatttgaacgaaatgatgccaatcatctacaccccaaccgtgggtgaagcgtgtgagcacttttccgatatttaccgccgtgcccgtggcctgttcatctcacatccaaacaaagcacatattgatgatatgctgcaaaatgcgaccaaacaaaatgtaaaagtcatcgttgttaccgatggtgagcgtatcctcggtttgggtgaccaaggtattggcggtatgggtattcctatcggtaagctctccttatatacctcctgcggtggtatcagccctgcttatacactgccagtcgtcctggatgtaggcaccaacaacccacaacgcctgaatgatccgttatatatgggctggcgtcacccacgtatcaccggtaaagaatatgatgaattcgtagacgaatttattcaggctgttaaacgccgctggccaaatgtgctactgcaatttgaagatttcgcacaaaaaaatgccatgcctcttcttaatcgctatcgccacgagatttgttgctttaatgatgatattcagggaactgccgctgttacgttaggtagcttaattgccgccagtcgcgcggctggccgtcaattaaaagatcaaacggtcaccttcctcggcgcaggttctgccggttgcggcattgcagaacagatcgtcgcccagatgaaatcagaaggtttaagtgacgaacaggctcgtgcccgtattttcatggttgaccgcttcggtttattgacagacaagctgccaaatctattggatttccagaacaagctggtgcagaaaagcagctcattggctaaatgggatgtaaacaacgattcaatctcgctgcttgatgttgtccgtaatgctaaaccgacagtattgattggtgtttcaggtcaggcaggtttgtttacagaagagatcatccgtgagatgcataaacattgtgaacgcccaatcgtcatgccattatcgaatccaacttcccgtgttgaagcccgtcccgaagatatcatcaactggacagatggtgccgctctggttgcgacaggtagcccatttaatccggtaaaatataaagatcaggaatatccaatagcacaatgtaacaacgcctatatctttcccggcattggtctgggtgtcatcgcatcaggggccaaactggttactgacggtatgttgatggcagcaagccgaacattggcgaattgctcacccttagcccaagaaggtcaaggtccgttactgccacttatcgatgatattcaagaagtgtcacgcaaaattgctaaacaagtcgccaaagaagcacaaatacagggcgttgccactgtgacctcagatggagcactggatgaagcgattgaacgcaacttctggaaacctgaataccgcgtgtacaaacggacttcattctgatttttatcattaaaaatacgtaaaaagcttgttatacccgtcatctttcaagttgcctctttgttggctgcactctctcaccccggtcacatcgttatctatgttcccggggattcgctcccttgccgtctcgatgcattttgaaatccatagggtatagttctcttttactatcaagcttttttcttatagagaaaacttgcttcgaaatttcaggtaaagtagcctttaacaaatccagtcattaatgtgtataaggcaaaagcatgtggaatcgcctgataacaagtctgttattcatcacagggatgctgatactgacagctattgcacttgaccgctggatgagttggaaaacagccccctatgtctttgatgatctcaaacaacttcctgaacgtgaagtgggtatagtacttggtactgctaaatattacctctctggtgcgccaaatcagtactatatgtaccgtattcagggagccattaatgcttataacagcgacaaaatcaaatacttgttactgagtggtgacaatgctcagcaaagttataacgaaccggtcactatgcgcagggatttggtaaaagcgggtattcctgctgcaaatatcgtactggattttgctggtttcagaacacttgactcaatagtcagaacccggaaagtttttaacactaatgatttcacgattattacccaacgatttcattgcgaacgagccctgtttatcgctatgcatatgggaattgatgctcagtgttatgcagtttctacccccaagaatatgattaccgttcgattacgtgaaatcattgcccgtcttggtgctttgactgatctttatattctgaaacgcgaacctcgtttcttgggcccgttgatccctattcctgctccgtataaggtaccaaaaggtatgactaattaccccgccgtcactccagaagagttacggacaatggataaaacccagcttaagccgaccgggccaacaccgccgtgatatcacgccaccgctgttctactggcccttgcgggtgacgacgtaaccaccagcatgaaaaaagaatattcaccgcccaaatgggaagaataaaggcaagtagttccaaacggctaaattgaccaaacaacccaaagttataaaatagcagggtgcagattaaggtttgtagcaagtaattactcatcgccattcgcccaacctgattgaaccagtaattaattcgccagcatgaaatgaccggccagaaaccatatattaaagccatataccccagtgcctgaaatggcgttaccaactcagcaaggatataaccgacaatacctgaccaaaagtaatcccaattatggatatattggaaaaccacagagaatatctgaacagcaatactgagcggtatcagcactagcgccacatttcgataatggctcactgaaaattcaccttttagccaaccattacgcattaatccagcaccacatgacataataccgataagctgccaaccatactgaacaaacagcatgaccatcatcaacatgacctgattgaaacgctcttttactgccagccatccaccagacgttttccaatatgtttcgtataacatctggaattccgtcaactgccaagaaacatcattagattcgccgctggaaaaaaagccgagaataaacaatagcactaatccgatcagataaaaaatagcgcctttcataaataaccggttactggcgctattttggctaatcaattgaaaactgaaaaaacctgctaaactatacgagagcaaaatatcgccatcccagaataggataccatgtcccattccaattagagcaagtatggttaatcgtggataattccagattttgccccttggtaatagtaactccaatgctgcaccaaataagaaggccaaaatacacaggaactttccctgaacaaggacgctaagtacagaccagacaatcaaatcagttaaagaagctgaaccattatataccggattcaaataagcggcggatggcaaagcaaaaccggagatattgagtagcaatatccccagtattgccaagccacgaatactatccagtgagtcaattctctggcaggccatgtttatatcccggtgtaaaaattacacatggcgagttgtacgtaaaaactcttgacgggtattttggctagatttaaacaatccccccagagaggttgttgtcgtggtactggttgcatcacggataccccgcgctttcacacagtaatgaaccgcatcaatcgatacggcaacattattggtaccaaggagtgtctgtaatgcaatcaaaatctgctgggtcaggcgctcctgaacctgtggacgctgagaaaaaaattgcacaatacggttaattttagacaacccaatcactttatcttttggaatataggcaaccgtcgccttgccatcaatggtcacaaaatggtgttcgcaggtactggtgagtgtgatatcacgaacggtcaccatttcgtccactttcattttattctctatcaatgtgattttcgggaaattgctgtagtccaatcctgaaaaaatctcatcgacatacattttcgcaatacgacctggggtttctgccaaactgtcatcacgcaaatcgagattcaacagtttcataacttccgtcatatgctcctcaatccgcgctttgcgcacttccggtaccaatgcctgaccacgcaaaggcgtttcaaggccacgagtttccagcgccgaatgcacaagctcagcttctttacttaaggatgacattattttctccaaagacattactttccatcatctggcgggtagtaaaattcaagtcatgaatactatcactgaaacaatcacgactaacagataactattgcacacactgtaaatgagcacgtggtgattatccagtgattgcttttcataattatacccgtcatctttcaagttgcctctttgttggctgcactcacccaccccggtcacaaaccaataacccggcaatgaccaaggtaatcaatgcaacatataacgctggctccaatctcccggttattgtggtagaaaccgctgacagcatcggaccaattagctgcccgacagcatatccggtggttaacaatccggccatataacggctatgttctggcgctaattcacgcccatattgaaacgccatttgcaccacacacataaaacccccaccaaccaacaaagagcttaatgccagaccacctattcccggaatgatctcagcgataagaatgcccacagcctgaatccataaagtgatcgcaagccggatttgcgttgtcagcatatgacgggtcagaatagcaaaaccaatgccgatgactgcggcaccaccaaatattggccagacaaactgcgcaaacaagctgccagggaaacgatcactcgccatttgtgaaagaaaagtcgctggcaaaatataaccaaagcccgctaagctgtaactccataccaactgcttaattgcaggcgtcaaagtcagtttcttcacctcagcctgtgaacggtgtaactcaccaccacggggtaaatgccgactaatatagatactacaaatcagcgccaaaatgccatacaacatccatgcttcggcagcgctcacttgccatgcttgaataccaatagcaaggataccagtaacgaatatcccgactcccggtcccgcaaatatggcagcactcaacgcaggacgattcaatttagccaactgttcattggcccatgatgtcaccaataccaatgtccagccacttgcccaaccaataagaaaacgggcaatactgtgcaatatcgccccatacagtagtgcagagagcaatgtgataatcactgctccccacaatccggcccaaagccgatattcaatcaaacggtgcgcccgcattgcatcgtaagaaccagccagatatcccaaatagttaaaagccgcaacgatacctgccccagttagactaaactggaattctgcgatcattaaaggcacttgaggagtgaaggcagtacgcccaattcccatagcgacaaccagcgccaaaaatccactcattgcgatatgaaaagcgaggtagcggtgactttgttgaggagaagttgaattgttcatagccataaaatgttatttttttaatttatttctcataagccataacaaaaatcaaataaaatacacacttttaattaacaaaattccagaaaaacgtaaattatttctgcccataaataaaaagtcagtaagcaattaatgacagtatctggaacatcggagtatatgaattttcgtcctctgctccatttatttatttttacctctactcagttacctctattaaggttaaatcgagttttacaacataacattagctgaattaaccaagcttccacacaatattgtccacacaataatgccaaaatagtactaacaaacttgtctataccctatggatttcaagatgcatcgcggcggcaagggagtgaatccccgggaacatagcaaactatgtgaccggggtgagcgagtgcagccaacaaagaagcaacttgaaagatgacgggtatataagagatatgattcatcatgttatgtacaaatattaataaggagcattgttatgtataaagcatttcaaggtaagactgctattgtaaccggtggtggaaccggtataggacgggctatcagtattatgctggcgaaacaaggtgctgctgtcgcagtgatctattcacaaagtgaacttgaagcgcaggaaacaacagaggccattatcaaggatggggggcaagctatcgcgataaaagcagatgttgccgacgaatcggctgtacaagccatgataaacaccgtcgtggaaaaatttagcgggatcgactatctggtaaataacgcggcgacaactaggcaacttcaatttgaagatcttgatgccatatctagcgatatttgggatgccattattgatgttaatgtgaaaggcacatttcattgttgccggtatgcggcaccttatcttaaagcaagaacagggagtgctatcgtgaatgtcggtagtatcgccggcgaaaccggcctgggctcttgtatcccctacgccgcttccaaatcagcggttcacggactgacaaaatccttagctcgggcactggctccatcggtcagggttaactgcgtagcgccaggtgccgttgaaacaagatggtggaaagggagagaagagaaaatgcatacgctttgcacttatttgcccttagaaagaatttcaacgccagaagatgttgcagaaataaccttaatgttgttaaaagcagaatcgatgacaggacaaatcataaccgttgacagtggtcaaaccttataagcgcttacgcgctttctaacctggctatgacagcagcaaattttctaacgccaggttaatcgtcgtgttctacatacttatcacatgtcgcggcgttttggataaccaacaccaatatcgccgtgtttatggaacatacgagcaaagtcaaatatcactcacacatatgatgatctctgccataatgccactaatgaaaaaccttatctgggagcatcattatggatcactgtcatacctctgaattgatctctttgcagcaggcgttggaaaaacttctgacgcaagttacaccactgactgacacagaaaccgtcagcctcccgcgaacatcaggacgcattactgcaacaaatattatttctcctatcaatgtgcccccttttgctaactcagcaatggatggttatgccgtacgccatgcggatttaaacagcaataaaccactgcctctggcaggaaaagcactggctggcgtaccttttcaaggagaatggccagttgcaacttgtatccgcattatgactggcgcaccgattcccataggcgctgatacggtcattatgcaggagcacgcagaaactactgatgatggcatcgttttcactcagccagccaagcaaggtcagaatatccgtctggctggcgaagatattgctaaaggtgcagtagttttgtcggcaggcagcaaattatccaccgctcagttacccctaattgcatctttaggcatcaccgacgttgaggtggttcgcaaattaaaagtcgccattttctcgaccggtgatgagctacaagctatcggtcacccacttaaggaagggcaaatttatgataccaaccgtcttaccgttcgactgatgctggagaaactggattgcgacgttattgatttcggggttattgcagacaatcctcaagctttacgccatgttttcgcacaagcagatcaaaaagcagatttagtcatcagcagtggtggcgtttctgtaggtgaagcagactacactaagcagatactggatgaattaggcgaaatcagtttctggaaactggcaatgaaaccgggtaaacctttcgcttttggcaaactaaaaaacgcctggttctgcggtttgcccggtaatccagtttcagccgttctcactttctatcaattagttcaacctttaatcgcgcgtctatccggttttacggcatggcaaccccctatgcgtatgcgcgccaaggtcaccacgccattgaaaaagagaccgggaagaatggattttcaacggggcattacttcggtgaatgaacaaggtgaactagaagttcgtacaacaggacatcaaggctctcatatatttagttcattcagtcaggggaactgcttcattgttctggaacgtgaacgtggacaggtagaagttggtgaaaatgttgaaatcgaattgttcaatcacttactgaaaaatgaataatgaccattgaactaacagatgcagaaaccctacgctataaccgccagattgttctacgcgggttcgattttgacggtcaggaaaaattgaaatcttcggcgatcctgatagttggtgccggtggtttaggttgcgcagcatcccagtatttgaccgcagcaggtgtgggaacaataacactgctggattttgataccgtttctctctcgaacttgcaacggcagatcctacatcgagatgaacgtatcggcatggctaaagtgcattcagcccagttgacactccgagcaataaacccacatgtcacgattaaaaccgttaatggattactggaagatcaagcgctagatgaacttatcagccagaatgatgttgtcttggattgtactgataatgtaacaatccgcgagcaactgaaccgcctgtgtctggcaaggaaaacgccactggtttccggcgcagctattcgcatggaaggacaactcactacatttacttatcagccaaatgccccctgctaccgttgcctgagcagactgtttggcgaaaataatctaacgtgcgtggaaacgggagttatggcaccattggtcggtaccatcggtacattacaggcaatggaaaccatcaaactccttactggatatggcaaagtcagcagtggaaaggttttactgtttgatgcgatgacaatgcaatttcgtgatattaaattacttaaagatcccaattgcgaagtgtgcaacagttaatttatccaccgatagaaataacaagcaatagaaataacaaacaatagaaataacacgccccggttatctcaaccagggcgatttatgccacaagatgattactcaataattccctgacttcttagatattcatcataagtacctttgaaatcaatgaccttatcagatttaatttccatcactcggcttgccaatgagctaacaaattcccgatcatgagaaacaaatatcaaagtacctttatacaattcaagcgcaaggttcaaagattcaatagattccatatccaagtggtttgttggttcatccattatcagaatatttggctgttgcatcatcaacttaccaaataacatccgtcctttttcgccacccgataatactttgacttttttcttaatgtcatcctggctgaacaacaaacggcctaatacactacgaacagcttgttcatcatccccttctctcttccattgactcatccagtcaaaaactgtcagatcacagtcaaaatcactggcatgatcctgagcatagtacccaatgctactattttcagaccacttaactacaccactggttggctctgtttcaccaacgagcgttttcaagaaagttgttttaccaataccgttagcaccaataacagcgagtttttcaccaacttccagcaggagattaagatttttaaacagagggccattatcatagcctttagtaaaaccttccaattccagagcattacggaacaatttcttatcttgctcaaaacggatataaggattctgacggctggatgctttaacttcttccaactggattttatcaatctgacgagcacgcgaagtcgcctgttttgatttagaagcattagcactaaaacggctgacaaaagactgcaattccgcaatctgtgctttcttcttcgcattatcagctagcagacgttcacgagcctgagtggcggcaaccatatattcatcataattaccggggaacagacgcaactcaccgtaatcaagatcggccatatgagtacaaactgtattcaggaagtgacgatcatgggaaataataatcatggtgctgtttcgttcattcagtatttgctctaaccaacgaatagtatcaatatccaggttattcgtcggttcatccaataacagaacatcaggattagaaaacagcgcttgagccagcaatacacgcaatttccagcctggtgccacttcgctcatcaaaccgtaatgctgttctactggaataccaacacctaacaacaactctccggcacgcgcttcggcactataaccatccatctcgccataagcgacttccagatcggcaacgcgatagccatcctcttcactcatttctgccatggcatagatgcggtcacgctcctgctttacctgccacagttccgtgtgccccataatcacggtatccaacaccgtgaactcttcaaaagcaaactgatcctgacgcagtttaccaatacgttcattgggatcggtgctgacattgccgacagagggtgtcagatcacctcccagaattttcataaaagtggatttaccagaaccattagcgccaatcagaccataacggttaccgttgccaaacttgacagaaatgttttcaaacaggggcttactgccaaactgcatggtgatgttgtttgtacttaacactgcgttcgctcttacatttagaaacaaaaggaaaatcggaaaaatcgataacggcgcattatgccacaatagtgttaagagatcgcggggagttttgagcgttattcgagctatacccgttattctgaaacagatattacaccagccgctaatcaatagaataattcattctggtactctgaatgacaaaacgatatcgtgatttaattttatgcggaatgtgctttcaaatcaggcaaaaagaagaaaataagagaaatcaatattggcacactgcaaataaacatattagggattaatgacattacgttcacaataatttcctttttacagttttttcatcaaggatgtaatagtccctatagtgaatataattttgcctaattatccaaatatttgctaatcaataaatcagtaaacttcttagcaataataaagacttatcaaattagtgcgtttataactactcaaaataaatacaatctgttactaagttatactcattcaatattacaacatattaacatctcatcaatataatgatgaattaatgctcaaaaaaataataaaattattatcattcatcatagacccagcggcctatttttgtttgtcattatagttgttttatatattagttattaaaaacatagacatattttatcatttatatctacgtttttaagtacgaaaatataattaaccggttgttattttataataaaacaccaagatcaaaaaaattgacttttatctgagagaaaaggtatcttaaaaaacatcgagacaaaataaatctttttatctacaccaatgaataaatagcttgcttttaattttaatattttaaaagattaaaattattaaaattattaaaaatggtaataaaatggtgataacgataaataaaaagactcagatataaaaattgacttttaggaaacataaagaaacggaattctaataagaagtaaaaataagctatccaatatagctaagaaggttagttccaccccaagtgattttatataaccataacaggttgaattaaaatcctggaatttattaattatatttttaaaatcaatcacaagaggtaatattatgtcagagatcgaagtaatttctttaaaagcaccaattagcgttattgcaaaagtaactaacaaatcaccatataaacttaaacttatccaggattctattcgtctggatcaaggtgagtggactactcttcctcctcaagtcattaatagaagcaatgatagcacacctggaaaagcgatttggagaagtgattcaaacagcctgataggtggtgttgcagggcgctgtacttatgtatttgtggatagcaaaggcgaaatctatagtatctatattacatggagtaaccctttgattggcagcagcagctattcaatctcaaccgattatttaggtgatgatttacatttatcctatacagcagatggcggtaataatccagtagtagaatatatgattgtaagctaatacttaatcactagtattaacaaccattcctgtgagaagatattttaattaatatctatacaacaggaatggtttatttatttcgagaaacaacatttttatttaccttaattaaaggtaaatgctgattatttctgtaccaccctctcttttattaaagtggatcatatctccattctggctaatacaatcaactcaacctgattaaaatagtgacttctagccactatttttaattctcttatcagtttaaattctattttctggtttcttatttacacattacaatgatatcgcttttttattatgaaattgattttaatatgtttttatagatggcgaccgataagtattaaaacgatcgagtaagatagcaggatcttgctcaattattgccatatgacgatatttttcatgtaagaattgttcatcagccattttattaatcatcgcaattaacggatcataaaagttattaatattaagaataccgcaaggtttcgtatgtaacccaatctgactccaggtaaatacctcactgaactcttccaatgtgccaaaacccccaggcaaagcaacaaaaccatcagctaactcaatcattttgtttttacgctgatgcatagtttcaacaacgtataattctgtcagatttttatgtgatatttcccgcgactccaataatgttggaataacaccaatgactttcccaccctctgccaaaaccgtattagcaacagttcccataatgcccacacttgcgccaccataaatgagcgtaagattacgtttaaccaattcctttgcgaagataatgacattttctttatagatttcagatatacccagacttgaaccacaataaacagcaatacttttcattatcttagctcctgttactttaccttcacatgaaaaataggattatatacccgtcatctttcaagttgcttctttgttggctgcactcactcaccccggtcacatagtttgctatgctcccggggattcgttcccttgccgtcgcgatccatcttgaaatccatagggtatacgttagtatcacaatcatacaactcacttataaaactgataccaagaaaacaaaataaaaacggtttctttcatattcaatattagcattaatcataacttattcttaattatatccgttatctttcaagttgcctctttgttggccgctctcgctcaccccggtcacatagtttgctatgctcctggggattcactcccttatcgtcgcgatccattttgaaatccattgggtatattatgatatgaaatcaagcatcaatcagatgataataaataccttcatcacttgtaattcctaaattatcaacatattaaaatacaatgtaaatccataccagaattatacaccaataatgaaatttaatctcactataaacatataaaatagtctaataaatgaaaaatatttcgctaaaattatattctctaaacctattgagttatctgcatttcactgcgaagattatcggtcagatcacttgattttaattgaggttttgcccggatgtctccttccaagctccaaaagagtgcctttccattaatacctgtaatactgttactactggctatgacatcaattcagggcggtgcttctcttgccaaaacgctgtttccggtcatcggtgcaccgggtgttaccgcactgcgcctaggtcttggaactctcattctgtttattatttttaaaccctggcgcctgcgttttagccgaaaatccatcatgccactgcttacatatggtattgctcttggcgcgatgaattatacattctatatggcactgacaactattcctttaggtattgccgtggcccttgaatttaccggcccattggctgtagctatgttttcatcacgccgaccaatagattttctttgggtggcattggttatcgccggcttagctttcctactccccattggcaataataatattaatagtttagatcctatagggattatttatgcactcagcgcaggtgtttgctgggcactgtatattattttcggccaacgcgccggtgcaggtcatggagcagcaacggtgtctattggttcatttatcgctgctatgatatttttccctgtcggtttaatacaaacggggccagaactattatttgatatgtcaattctccctctggcactggcaattgcgattctgtctactgcattcccatatacactagaaatgattgccctaacccgtttacctgcacaaacatttggtactctaatgagtcttgaacccgcactgggtgcgctatctggtattgtgtttctgaatgaacatttaactataacgcaatggctggcgctgttctgtattatttttgcctccatcggttctacatcaacaataaaaagaaaacctaaaatcaccgaagttgattaatcattttatttaatcgaaatgaaatagaagccggaggagtaaagtcattctccggttttttataaataaagaaactcattcataacaaaattattcacgcagatttacctgataaattattatacttttcaatattaatctaagaattttatagtgaatatttccctataaaaattaactattgatttaataggaataaactatatgatttaagactaatatcgagttacattcatctcgccaacgaaaaactcattattaacatccaggggaaattattaagcacattggaacatgcgtggcaaaaatttcatttccatccatgaaatgctggatacctttcgtgccacaattattgaacattcagatatctttgcagaaagagtcgtacaacttggtggaatagctctcggcaccgtacaagaagttaatagacacacagcactgaaaagctacccaacaaatatccatgacgtgcaggaccatctaaaagcactggccgaccgttatgctgttgtcgctaatgatatccgcaaagcgctgaacgaagttgaagatgaaaacaccgcagatatgttaaccgccgcctcccgtgatctcgacaaattcttatggtttattgaagcaagcgttgagcagtaaaatataaagagccaccatattatgcaccctatggatttcaagatgcatcgcggcggcaagggagccaacaaagaggcaacttgaaagataacgggtatagagctctgagacttacaggcccctattaacacagggtcctgtttacattagcctttcattaccaagatccgacacggcaaaacatcataaaatgccctccattcggataaatttcgtcatattctttaaaaatcagtacaaactgtctataatccacacttattttcagaaataacttgaggaaatagcaaaatggacaacgaagtaaaagacagcaatggcaccctacttaatgatggcgattctgtacaggtcatcaaagatctaaaagtaaaaggcacatcagcaacgttaaaacgcggcactttgattaaaaatatccgtcttacccatcgtgaagatgaaatcgaatgtaacgcagataaaatcagagggttagtactgaaaacctgttttctgaaaaaagtaggataagtcgccttttctatcgattttatttactgaatttgccgataaaaaaggggggatagggctgctcaggggcaaccttgttaagcagtaagcgaagcgaactaacagatacgcccccctttctttatacctatgcttataactatcgttaaggcaatctaatgtcttttaatttttctcatataaaaaattaacattcacaaataaaacagggacaattaaaatcatccccaaacaaataaatatttttttataaaatcattcaatctcaatatagcgcactcttcttacagcgttttagctcacaccgtaggcatgctactgctttctaataaatactaaaaagttgactttttatatgccgtactgtataaaaaaacagtaatattaatgcaaggaaatccaatatggaaccaacaatcatcatccccggtcatttatgcacatccgagttatttgcctaccaaatacctaatctttggaagcatagttccgttacaataccatcaatactggaaggtagtagtcttacagaaatggcgaaagatatcatccagaaggcaccttcctatttttctcttgctggcatgtctatgggaggtttcatttgtctggaaataatgaagttagctccggagcgcgtaagccgattagctttacttaatagctctgcgcgtccagagacagaagagcaaaaaaagatgagagaaaatttactaaataaaaccactctggaaaatttcgaagaaatcttaaaaaatatggctaccacaggagtgcacaaatctcgtcagcacgataaaaatcttataaatactattattcgcatggggaaagaaactggctttgatgcttatgttcgtcaatccaaggctttaggtgatcgtacagataatcgaaatattttaacccatatcagtgtacctacattggttcttgtcggtgacagtgacaccataactccacctgaatattcagaagaaatggctgaaaagataccaaacgcaaaattaattaaattatacaggtgtggacatgccacaacacttgagcagccagaagaagtgaacaaagcgctcatcgagtggttaaatatgagttaacctatctatgcacgatgatattatttcaacatatcaaacagttaaattaaacggaagttagaatatgttaacatacaataaagctctagagttctttggtcgtgatttcaaatttccccacacaattaaagaacttccagagaagttatccgatttgaaagatcttgaaattggtttttttaaaacaagtgatgaggtatctctctctttttggaaggccggtaaaggagaaactttaatattcatccccggttggtcctcacatggtgcagaatatataaatataatatatcttctcagcaagaaatatgaagtttatgtattggatcagcgtaatcatggtttatctcaaaaagtaaattatggaaatagaatttctcgtttttctgctgatcttcatgaatttattgttgctgttaatataaagaaagcatatttctgtgggtggtctatgggatgttcggtactatggagctacattgatcttttcggattggaagtaataaaaaaaatagcattgattgatgaaccaccttctatttattgccacgcagattggtcagaggaagaaagaattaaagcaggagcttttacaaattcgccagaagctttgatagacgtctatagtggaaaaattcccgggaataaaatgttctttaattctgatatacttaaatattatacaacagaaggagcacccgcatttttcaattcacaaacctttgccaatgaatttgttccacaaagtatagatgatttgaaatcagtactatttgaacatattttaaatgattggcgagatgttatttcccataaaataaccgttcctactttaattttttcaggtgaaaacagcgactggatagaaagccaacaatggatttcatctactgtaccaaaaggggaaattataatttatggtcgggaagagcatggagatcacttcttagcgcttaaagatccattaagattttcaaaggatctttctgctttcttttattaaaaaacaggagaaaagaatgtttaccggactaagtgcttttcctttaacaccgctgtatggcaacaaggtagatgagaagacatttatctcgcttattgaaaatcttgttgaagctggagtggattctatcggcgcactgggatcgacgggtagctacgcctatcttacattatcggagcgcgcgcatgtcgcccgactggctgttgaacatgcgaacagtataccggtgatggtcagcattggagcgctgcgtgtagcggatatactcagccttgctgaagatgctcaacacgcgggtgttagcgccgtaatgctggcacctgtttcttaccagcgtcccacaccggacgaggtgtattcgctctatgaagaagtcagccgttatctatccgtaccgctttgcgtctatgataatcctgcaacgacaggttttgaatttagcgatgagctgctgattaacattgccaatttaccgtctgtcagctcgctcaaacttgctcgcttgccgcaggcactgtctctggctacacaacaggtgaatgcgcttcgttcccgccttcccagccacgtttcgctcggaatcagcggggactggcaagcggcgacgggcctctgcgctggatgtgatgtctggttctctgtcatgggtggactttttccgcgaactgcactggctatcactcgcgcagcaaaggataatgatacaaaaacggtacagatgttgtcggctacccttgaacctgtctggaggctcttcaaaacctatggtagcctcagggtcaccgcagccgccgctgagttactgggcaaagtaaccgccccttgtcttccctttccactcaagtcattatcaggtcagccccgtgatcagctaggcaccattctcgaagatttaaaaaaccttatttaaaccaaatgatgaaaaatatgctcgccggagattttcttttccggcgaagagacgtctttctttacaccatcgtgcttgtagatgatgcgatggtgccgcttctccgcgaagaccctgaatttgcgcagcattatctgcatcaggcttttattgatatggatgaagaaggcgggcaggaagcgtttctaatggcattgcgccacgtagtagaggcgcgtggaggaatggctcaagttgctgaaaaagcaggcatttctcgtgagacactgtatcgcacactgtcgccgaaaggcaatccaacactcaaaactctgcgtagcgtagttgcagcaacagggttccaattctcgcatattgctacgatagcttagtctttgattgattggaatgataaagtctggatggcgatgatatataccctatggatttcaagatacatcgcgacggcaagggagagaatccccgggagcatagataactatgtgaccggggtgaacgagcgcagccaacaaagaggcaacttgaaagataacgggtataagcagcaacttaaggctgctcttccctgtaatcgccatcttctacatccctccagactgtcgtggcacagcatcagaggtacccgtggtttatcatgtttttccagatatccacgagtagcctcgaagtaggtaaacattaattcagatttaacaaagcgcagttgtataaggtggctgattgcatcgtccacaaaaactagaatacgggtatatacccaatggatttcaagatgcatcgcggcggcaagggaacgaatccccgggagcatagataactatgtgaccggggtgagcgagtgccgccaacaaagaggcaacttgaaggataacgggtatagattatatttttgtcatatcagcaaaagacttctgcatttactgctcttttttattgcaatttatctcatgataataaagcctttcttaattaaatattataccctatggatttcaagttgcatcgcgacggcaagggagcgaatctccgggagcatagataactatgtgaccggggtgagtgagtgcagccaacaaagaggcagcttgaaagatgacgggtatacatgaggtttattatgtctgttcctgcatttggattaggtacttttcgtctgaaagatgatgttgtgatcacatcggtaaaaaatgcccttgaattgggatatcgtgcgattgatacagcacaaatttatgagaatgaagccgcagtaggacaagccatagaagaaagcggtgtagctcgtgaagatatctatatcacgacaaaaatctggacagaaaatttaagcaaagaaaaattgataccaagtcttaaagagagtatagcgaagctgcgcactgattatgttgatttgacgctaattcattggccatcaccacacaacgttgtcagtgttgatgaaacaatgaatgcgttactggacgctaaaaatatggggttgacacgtgaaatcggtgtttcaaactttacgattgatctcatgcaacaggctatcgatgcagtaggtgctgaacacatcaccacgaaccaaattgaactttctccctatctacaaaactgccacgtgacagcttgggcgaaagatcatggaattcatatcacttcctatatgaccctcgcttatagtaaagctcttcaagatgaagttatcagacgcatagccaccaaacatcaagccacgcctgcgcaggtgattttgtcttgggcgatggcattgggttatagcgtgatcccatcttcaactaagcgcgaaaatttacaaagtaatctgagagcctccgtgcttaaacttgatgcagacgacatggcggcgatcgccacacttgatcacaacgaacgtctcgttaatccagaaggacttgctccccaatgggataattaatgactcccacttcttaataaactcagtaatctctccgctttgcagaaacatacttgcttatttcagctccttcgggagctgcttccattttcacttagtaaatcgattttacaaattacccttaattatcttagataataagaaaactcgaacatttttacacttacagcaaaagtcttttgtcgtaataagcctttttagaaagagtttgcgaagcataatatctccatatacacaaatcaaaatcaatgaataataaagagtgagaaatattatgctttttgaacgctattctctgaatggtctgtcgttatctaatcgtattgttatgccaccgatgactcgttcacgggctggaacaaacggtatagcgactgatttgatggctgaatattatgcacaacgtgccagtgcaggactaattatcagcgaaggtacacaaatcagccaacaggggcaaggatatgcatggacgccaggtatttataagcctgagcagataataggatggaaaaaagtaacagatgcggtacatatggcaggaggcaaaatttttgctcaattatggcatgtaggacgtgtttcacacacgattctacaacccaataattctgagccggtttctccctctgcccttcaagcaaaaggtgtaaaagtttttctggatgtggcaggccgtggacctgaacatggtatcggtgaaatggtacaacactcgcagccacgagcactgacacttgatgaaattccagatatcgtaaatgattatgttcaagcagcaaataatgctattgcagcaggttttgatggtgtagagcttcatgcggcgaatggttatcttattaatcagtttattgattctcagactaacctacgagatgacgaatatggtggaactttacaaaatcgtttacgtttcttgagagaagtcgctacatcagtggctagcgcgatagggaaagataagctaggtgttcgcctggcaccactcacaaccctgatgggttcaaaagatgatacgcccgaagccacttatctggctgccgcgagtgtgctaaatgatatcggcatagcctatattcatattgccgaagcggattgggaagacgctcccgtcatgccagtaaccttcaaagaagcttttcgcctcctttatcacggcacgttgatatattccggtaaatacactttggaacgagcggaagaagcgctaactaaaggctgggcggatttgatcggatttggtcgcccttttattgctaacccagatttaccctatcgtcttgctaataagctagagctaaacccgccgataaaagaaaaatttttcggtggtaatatggaaggttataccgattatttggctataaactaatatacccgttatccttcaagttgcctctttgttggctacacccacttaccccggtcacatagttcggctatgctcccggggattctcgtcgcgatgcatcttgaaatcatctttataaagattaatttttgctttaacgaccaaagtatttacgggagtcattgacatattcactcagaaaatcgataaatgccctgattcgggtgcttacagcctgatcgctgtaatatacggcattgaaaggcatcccgacgggtaaacgtttttcaaccagtagttcaacaagttcaccactggtaatctccttatcaatcatataatcagacagacacgcgataccattacccgttacacacagttgtttcagggtttcaccactgttggaagaaagtcccacggttatttcatgcagttgtccgtcctgacaagctatcggccaggtattcagtgataccggttcggtaaagccaagacaaatatggtttttcaactcctcaatgcattgcggtatgccatattttttcagatattcaggagaggcgacgatttttcgatagctggaaaaaagtggtcgagctcgtagactggagtcggttaagttgcctacacgaatggcaatatccactttgcgttcaatcagattgatatacgtttccgaagaaatcagtgataacgttatttctgggtagcgttcgcgaaaaggtttaatcagtggtatcagtaaatgtaatacgacgggtgttgcagcatcgatacgcaataaaccacttggagtgtgtttagattccataatttcagtttcagcggcggccatttcttgtagaacatgctgaactcggcggaaataacgctcaccttcttcggttaagctaagctgacgtgttgtgcgattgagcagactcacgcctagtttcttttccagtttttttatagaacggctcacggcggaatttgctaattgcaggtgttccgccgcacgactgaaactcccgttttccacgactgacacgaaaattgttaactcttctgaatttgccttcattattgccttccttgcaaaagagtattcatgtccccaatttccgcctctgaaagaacttccggctgctcaatggggaaaacgggcagcgcttgcaataatcttgggccataccttttgctcagtaagcgcctgtcataaatcaccacatcaccataacattcatggctacggataagccttcctacttgctgaataaggctaaaagaagcacttggtaaactctgcacttcaaaaggataacgtttaagtgatttcaaccactcgctttcagtaataatgaccggattattcaccggcggaaatgaaattttttgaatatgaacttgggacaggtaatctccctttaaatccagcccttccgcaaaagattgcaatccaatcagtacactacattgcccttcattaatacgctgacaatgtgtttccactaaccgataacgtggctgatccccctgcacaagtaacatcaggcgtaaatccgttacataagagagaaagatatccatcgctctctgactgctgaacaaaaccaacatgcctttatgttgctgactcagcaattgagccctgaaataacccgccatctcttgcaaatgagcggcttcattgtgcagtgtcggttcccatgacattttgggaataaccaatttaccctgccgtacatggtcaaaaggtgatgacaatgcgacaaaacggtccccggctttttcagttaacccggtcaattcctgaatacgagaaaaactattcagagaacgaagcgttgccgatgtcacgaccacatgaggaatgctacgccaaagcagttgattaagctgttcactgactctgataccggcacaatggaaatagaggtgcgattgatttttctcatcacggcgtctaagccattttgatatcggtgcactggatgactcttccaacgctgccaaacgccacaacttagtcatattttcaaaatatccaagcgcacgactggtatgcaaaatagaccgatgtaatctgacaatatcctgtttagccgtccgctcagtcaaatcattcagtatcgcttctgccaaaccccgtaaaccatcagtcagtttaaatagctgctggcagcaaagtagcaagttatccggtaatttaccccgctcaaacagatactcatcgacttcattcttttccggtaaaaacgcctgagtgataattgcgagctctctaaagcattcccgtaatttttcactgtgttcattcaggcgactggcattcgctaagcgtggtggctttgccggatggaattgcaccagatattgctcaacatgacgaacaaaagtatccaattgaccattaagttgaaacagggtgatttccccttcaacttccagagaatccctggcaacatccggtatatggtgcccttcgtcgagtaccaataacaaatttttagcatcaggcagtaccgattcactctccaatgccgccatcactaacgcatggttaaccaccaccacatcgacattttctatctcacggcgagcaataaaaaatgggcaacgatgataatactgacagttacgtcccagacaatttgctttatccgtactcactttcccccacaaagcatcggacaaagccaatttatggtgatcacgcaacccatcccaggcaaaggttgtgtaatcactacgcaaccgacgacacaattcccgctcttcactactggcaagctctgttttgtcctcaaccaaaaacataagatcaatctgttcgctatcggttgcacagatagcgtcaagattgcgagggcaaacataacgaccacgaccaaaagcaccggtaaatttcagatcgggaataattttgcgcaacagtggcaggtctttactgtaaatctgatcttgtaaagcaacattcgccgtacttacaaccaatggcttactttccgctctactgatagcaatgccaggtagcaggtaagaaagggttttaccgattcccgttggtgcctcaataaccaaatgacgaccttcctgatccgcaagtgtttttgcaacttcggcaatcatctgccgctgcggagcacgagaaataaaaccattaatatgttgaggtaatatcttataccactgacttatctgattttttattgaattggaaagtgccattggattctactgctatgaaatcggagcgctattgtcccacagagcagaaatgaaatcagctccatgtcgaggcaataatcagtcaactcgctcgttaaattagtgagcaccttgtcagctattcagaacgctatatacttcttattttctacaacatacttcctattttctacaacacctgagaacaataatgaaaaagctccttatcattttcatcgctatctttgcatttggttcaattggcggcgtattcttagcgggccttaatatgtatacccgttcgaccacaccgatagaatcactaaccagccaacaaccagaaaccaccacggcaccggtacaacaacaataacgggctgtggcatattttatctttgtatcaagtgagggacctcatgaataacgcatactttgtcactccacaatggctaaaagatcatcttgatgataagaatctcgtcatccttgatgcaaccgccccaccaccacctcaacaaattgattgtcataaactttggctgaatacccatatccccggtgcccaatttcttgatttagacaaaattgccaatcatcaaagtggattacctcacatgctgcccgatccgcaaacttttagtcaggctgttggcgcaatgggcattagtgaaaatcatttagtcgtgatttatgaccaaggcaatatgttctccgctcctcgcgcatggtggacatttaagatattcggtagccacaacgtccgtattcttgatggcggtttacaaggctggcaacaggcaggatttccaacagcatcaggggaagtgaagcgcaatcctcaaatctttaataccgatttcaatgccgacaaagtgaaatcactggaacaaattctgggtgcgctaaatgatcaacaaatccaaattgtcgatgctagagcgacagaccgctttcaagctaaggccccagaaccgcgtcccggattaagaatgggccatattcccggtagtaaaaacattccgtggaccatgttagtagagaatggccactttaaatcagaaactgaaattaccgatattttccataaacaaggcgtcgatttaaacaaaccggttatcaccagttgtggatcgggaatgaccgctgccgttttggtactgggcttagatatcatcggcaagaaagatgtttatttatatgacggctcatgggctgaatggggagcagatgaagccttaccacttgaaaaataattaaatgctatagggcatctctatgccctcagattattgacaaagtgctggttttttatccggcattttgttttaattaagttccgttcactcaacggagcttgccaccatgttaagacccccccctctccagactttcccgccagaaacgctctcgcttgacgagctggtccctaaaaatcatttggtccgtcaagtcgatgctgccattgatttcgaatttatccgcgaattagtcgccccgttgtattgccacaataatggccgtcctgctatcgatccggtcatgctgattaaaatgatgttactcggctacttgtttggcgtccccagtgaacgccgtctggtacaggaaattcaggttaatgtggcttaccgctggtttctgcgcctcggactgacagaaaaggtccctgatgcctcaaccctgagccagaaccgccgccgccgtttcaatcataccgcggtcttccaacagatttttgaccacattgttgaacaggcgatagccaaaggatttgtgggcggacacgtactctataccgacagcacccacctgaaagccagtgccaatccgcataaatcggagaatgtcatgcggtcggttccccccggcgcctatgttgacgcactggataaagccgtcactcaagaccgggcggcagctggaaaaaaagcctgaagccagccctaaaggaacggcagagaaagacgaaggtcagtaccgtcgatccggaaagcgggtttatgcaccggaccaacaaacccagggggttcttttaccttgaccaccgtaccgtggatgggcaagtcggtattatcaccgatacctacgccacaccgggtaatgtccacgacagccagccttttatcaagcgtttgacgcgtcagttagagcgttttgctctcaatcccctcgcggttgggttggatgcgggctattttacggccccggtttgttatctgacggaacagttaggcattatccccatcataggttatcgccggccgaataagggaccaaatacctttcagaagaaacatttcacctatgaccagctacaggattgttatgtctgcccgcagggagaaaaactgatttataccacaaccgaccgtcagggataccggcattatcaggccccggcggctatctgccagtgttgcccgcagcgtgatgcctgcacgcacgcgaaaggcggaaaaacgataacccgtcatatctgggaggccagtaaagagcaggccagagaaaaccggctaacggaatggggtaaaaaagtttacaagcgacgaaaggaaacaatagagcgcagttttgcggatgcgaagcaacatcacgggcaccgttatgcccattttcgcgggttgcagaaggtgcaaatacagtgtcttttggcggcaactgcccaaaatatcaagaagatagccttgctggtcgcgatgctttgttgtttttatctctggagggcgagccagtcaatgcccgcgaagcgaaaataacgccctgacgggcgattgaatcgggtcaatgaggaaaatgagttgtattatgattcgtaatgaaaggaacaaaccccattattttcaatggggtttgtcagcggtctgagggcatctctatgccctttaattattcaatatatacccgttatctttcaatttgcttctttgttggctgcactcaccccggtcacatagttatctatgctcccggggattcactcccttgccgccgcgatgcatcttgaaatctatagggtataaacaaatagatatatttttcgatccccagataacagccaatcaaataattcccgtatcgttatatttcacaatcctatttattaatttaattctctattcttcaatcaatactattttttatcaatcagagtgacataaaataatgaaataaatatatttgtaagttcaaatattattattattaacttaaaattcgactctgttttttatttaaaaataagattaagctactttccaataggcactaatattgcacgccattcttgtcaataaatcgtggacatgagcaacatgtgaggagatcaatcccaagatgtattgaaactctttatgataaagcaagaaaaataaaacatcctaatgcactaagtactgaaagagttgaatattaatgtattcaccaaagcataatatcaacatttatatcataaaaatggagagtaaaaatgactatttctcttaaagatcaaagaataaatctcgcgctcagctttattagtggtgctggaagtataataaccgaaaaaccagaaccgactatggttgcggaaaacattcaagcatcattggaaaagagtaaagtaactgccaatagattctctattatttgggggcccgctgtttttcgtgttgataatggaaaaaacagtaaagataataaggacgaccacgttttattcattgtaaaaaatcgcaaaattccccatgattatcgcatcgttatccgaggatcatggtctgatgttaactggcaggttgaaaactttgctgtacacgaaaccgtaaattggtcactttgggatcaaaatatcccggaagagtttaaagacgctaagatctcttatggaactcacatagcattagactatattgttaatcaagtaaaaagtaacaatattcctggtcatggagaatcacttattgacgcaattaataaaattgcttcggaaaaaggcatacataatattaccattaccgggcacagtttaggtggtattctcgcctctacccttggattatatttaaaacgcttataccttaataaagggaataacaatattcgtattcatgtttgttcttttgctaacccaaataccggtaatgacgtttttgcctcttacattaaatctgttttcaaccacacgtcagcaactagctataagagccattttttaaggatatataatcgtaaagatgttatttccctcatttggaatctggatggattagcaaaaatcccaactatctatgaaccattaattaaattagatgagaaactaattgacagatttaaaaagattgttcttctcgtgcaagataaaggttacaccaaactcacaccagatttaccttttacagcacctattgcagaactggatctcaataagcaagttgtttttcaacatattaaagcctatgccaaccaatatggcatgaatttagtggaggttaatgacggtactcaaccacctattgatgatcttgtggttattaatagtaatctatctcaagatatcgtcgcttatttcttacggatatctctgcctgataacaatattaatatctcataaatttattatattttatctcaattcaatggagccttattgcaaaggctccattaaactaaaattatttaaacataataataagatcacttttacatatatcatttagaatatcaccaatttataattattcccaaaaatattattcacagagataatctcaaagatatttacatatcactaccattaagtaatatatataataacaaaagatagcaataatattaacatgtaattattcaatatataaccccaatcatttacttttaatttataaataaataatttatatttttgttaaattaaataatatcaaaaaaccccatgtacttatttgacagatttgaaagttatcattaactttaagttaaattctgtttttatccaaatggaagagcaaaagaattaaatcttgatatttaaaccaatataccctacggatttcaagatgcatcgcggcggcaagggagcgaatccccgggagcatagataactatgtgaccggggtgagagagtgccgccaacaaagaagcaacttgaaagataacgggtatacctcacattaacactgattacatgaaataatagggagtaaaaatgactatttctcgtgaagatcaaaaaataaatctcgcgctcagcttcgttattaactctggaggaatcaaaactagcaaatcagaaccgagcattgtttcggaaaatatccacagatcattagaaaacagtaaagcaacagcaaataaattcactatcatctggggccccgcggtgtttcgcgttgacgacgttaatgtgaaaaaaagcgttatagacaaaaaggacgatcatgttctattcattgcgcaaaatcgccatgatccaaatgactaccgcgtggttattcggggatcatggtccgatattaactggcttaatgaagatattattgtctgtaaaactcaagattgggcacgatgggattcaagatcacctgaaaatgccaagatagcctacggaactgacatggcattaggctatattattaatcaaatgaaaagcaacaatcctccgggttatggagaatcgcttattgatgcgatcgataaaattgccctgaaagaagggatacaaaatattactatcacaggacacagtttgggtggtgtactatcttctaccattggtttatatctaaagagacgatatcttgacaaaggaaacaataatattcggattaatgtttgtgcttttgcaggcccaactgcgggtaatgatgctttcgcatcctactccgaatctattttcaatgacatatcagtagccggttataaaagtcatttcctgagaattcataatagtatagatgtggttcccctagcctggcatataaaaggtttggaggaagttaaagctatctatcccgtgttaactgtcacaattaatggtcttatcctttctgtccttgataagaattacacgcaaattttcccagatttccctattcattcacagattccaatctcaccaataacatcgtttgacaatttactggctaatattggcaatcaacatactcatgcctataccaaagagtatgatatgagtttcatcaccattgatgataattcaaatataccgactgattacgatattgttgtagttaatgatagcctatccgaaagtattattgatctcttcaagtttctaaccaaagataaaatcaatattacataaccttattatttatcacataagtggaacctttattaaaggttccattcattgcaataaatgactttccataaacagaattatatacaaattaacttatctaaccgttcaaataagtaatggtatttttgtagaattatttttcacctcattttatcatccatctttaatttcataataaataatttacatgttaccaaataaaataatatcaaaaaatcctctccacacatttgacagattcaaaattcattattaactttaaacttaactatattttttatttaaacgaaagactcaaaaaaattaaaccctagatatgttagccaaagcatcagatcaacatttaccagatgaaaaatggagagtaaaaatggttatatcttgtgaagatcaaaaattaaatctcgcgttaagccttattattaactctggagaaattaacggcgaaccagacgaaatagaaaccattaaatctgatattaaaaaatcacttaacagcagtaagacaacggcaaataaattctctatctgttggggaccggaggtgttcaatattaaggaaaaacaccatgacaaaaaatatgatcacgttgtcatgattgtgaaaaataaaaataatccaaatgattatcgccttgttattcgaggaacctggtctaagattaatgcgattgatgaagatctctgtgtatttaaaactgtagactggtcaaagtgggacacagatatccctcaagaatttaaaggcgctaagatctcccacggaacagacttagcattaaacacgcttattaatggcaaacctattgataaggacaaacctaataatgaggataccgactcactatcgctaatcgaggctcttcaacaaattatcgcagaagaagggaaagataagatactgaatattaccgtcacggggcatagtttgggtggtttactcgcttctactattggtttatatcttaaaaagcgctacatcaacaacaacaatatacgtattcacgcttgctccttcgcaggcccaactgccggcaatgatattttcgcctcctattctgacgctgtttttaaaggaacattaagccctaacgtttatgaaagtcattttctgagaattcataataaccatgatatcgttcccttagcatgggctatcaaagacttgaataaaattcaggatatctatccacatatagaaataaaattacttgttgatgctgttattctttttgtcctcgataaaaattacacccagctctttccagattgctcttttactattacaaagactctaggcaccattgacaacttatctaaaatgataggttatcaacatatcgatgcatatcccgaaggctatggcatgagtttcattcgaactgagaatgctccagtgacgccgaatgatcacgatatcgttgtggttaatgatagcctatccgaaaggattattgatctcttcgagtctctaaccaaaggtaaaatcgatattacataacgttatcttattatgtatatatttgatttaaatggagcctttattaaaggctccattaattgcaataaattatttttccctgcctatcactaattacagcaattcactatcactcacttttgtagataccaatataaattattttccatagctacatccttcacgttatcactaccaatgctaatataatcttacaaaggcatagcataatttttgtcacttattttaaagttcataatagataatttattttgttaaataaaataactttaaaaaattatatactctcatttaacagatttaaagattattattaactttcactctgttatttaaataaaaacccaaagtattgatcattggtgtttaagcgttaacacatcagatcagcattcattatattaaaaattggaaacaaaaatgacaatttctcttgaagatcaaaaaataaatcttgcgttaggctttattattaactcgggaagtataataacgaatcaaccagaaccggctatcgtttcagaaaatattcaaaaatcattagcaaatagtaaagcgacagcaaatagattctctatcatttggggacctgctgtttttcgtgtcggtagtgttaataataaaacaagcgttacagataaaaaagatgatcacgttttattcattgtaaaagatctcaaaaatccaaatgattatcgaatcgttattcgtggttcatggtccatgacgaactggtttgatgagaatttcaatgtaggcacaactgaaaactggtcaatttgggattcaaaagcccccaaagacgctaaaatttcaaaaggaacccatataactttagactatgttatcaaccaaataaagagcaataaccctcccggttatggagaatcattgattgaggcaattgataaaattgctctggaagaaggagtacataatattactcttacgggacatagtttaggcggtgtaatggcctctacgcttggtctgtatttaaagagacgttatattgataaaggaaacaataatattcgtattcatatttcctcctttgctgccccaactgccggtaatgatgtttttgcatcctatagtgaatctgtttttaatggaacattactatctagctatgaaagtcattttctccgggtccataatcgtaaagatatcgttaccctagcctggagcgtaaaaggattagaagaaatcaaggttctctatccaatatcaactttaattgttaacggttttatttcagtcgttaaagataagaattacactcaacttacgcctgatttaccttttactgcacctgatttaaaaccttctacaggtttaattgaaaaactcgtacttcaacatattgatgcttatgccaaagagtacggcatgagttttattgtagttaatgatcgtgctaatccaccaactgattatgatattgttgtcattaacgatggtcaatctcgcaatattagaaaacttttctcatctattattcaagatgaagataatatccaataatttcatcgtattgcctcttgctttaatttaaaccaaatggaaccttgattaaaggttccatttactgccctaccttattactaatgagtcattcctctgccaaaatcgtttatcgtaaccattatcacacaaatgaaattttttcttgacaaaaaaatcacacagtggtagtaaaattcattattacccaacaaaataggaggaatcgagatgattagcagtggatctaactaaaaaaattcagcggggtatgttaaataccccgccacaaaagagacaaaattatgaataaagaaacagaggacatcatgaagaaaatagcaaattatattcaagtagggaaatataaatcaggtgggatttttggagttggttcgaaacaacaaattatagaaaattatttaaaatggaagaatttagttaaggtttctagccttttgaagttaccgactcacgaaaaagaaatcacagaaacaattaaatcaaatttacccgagatatgtgataatgaaataaaagaaataatctcattcttagatgaaaaccatgctctgatggattttaatgaatacaatcaaaatgacagatatagtaggaactatttattttatagatatgcaggggcaatacctagtttagttcaagatagaataaagaaatcaacagttactataattggatgtggtgggattggaaaccatatatcatatctgctgtctacatcaggggtaggaaaaattacacttattgatgatgacacaatagagctaagcaacttaacaagacaagttcttttttcacaaaatgatatagggagaaaaaaaacagaagttttagagagagaattaaataaaaggaattctgaaacaaatatagaaacaattaatatgttcatatcatcaattaatgatttatataaaatacctcgttctgatttattcatagtttcagccgaccacccgtttgaattaattaactggattaatgaattctgtgttaaagaacgacaagcatatataaacattggttatattaatgatatctccgttattggaccattttatataccaaataaaacatcctgcataaaatgtcaaaacattatgccagagtatcacccaaaagatgacattttagagcatatagaaaatgtaaacaaagactttaaagcagcaacattccctagcgttaatggtgtcgcagcatcttatgcttttggggatattatgaaataccttggaagctttggtaacattctcagtactaataaaagaatcggaatacactcactaagcataaaaattgaagaacaatcaatacataaaaatgataagtgtgacgtatgctctcaaaaacaaaaattataatatattataatgtcatatttaattccatgcggatgttagtgggtgcaacatctacaatatttatcttaaatcatggtcttactctagttgatattggattgatgaagactatccaatcatttatatattttttatttgatattccatcatcatatctagctgacaaatttggtaggaaattcgctattattttatcgaccacttttggtggtgtatggctaataataacgggcattgcagattcaaaatatttattttatatcgcagaaatatttaattcaatatccttaactatattaggaggggttttctattcatacctaatagataactcattaaacgataatgacacccacaaaatattgggagaaagcaataaattacaatttctattcatggctatattctcaataataggatctctaataactgattttgatgacagattagtatggctaatagcaggctctggatgcattattctatctgtaagcctttcatggttcctaccaaaatcaattactaaaaatagacaaccaaacttatcattccttaaagaaataaaaacatcaatagcaatgctgaaagataataaaaattatcttttcataacatctatttctctatcatcctctctgctatatttccaaattatcctccaatattggcaaccattaataaattacatcatagaagagcttggtgtcagcatctttttcgggattgtattttctgcaattttattatctcaatcaatatcaggatggataatctcaaaaaatgaagacaacaacaaaaaccatctttatagtatagtaatcctattggtatgtagcttaacgtgcatttatggtgtatatgaaaagaaccatataaccaccatatcgacgattattatgtttggagcaaaccaagtaatgacaacatcattaagatccaactaccaccaaataataccatcagaattaagatcaacatttgactcattcatatctacaattacaaggctgatagcagtaatagtgataccgttaatcgcgttaatcactgagaattttggatggatatatttccctatattgatatcattaattatttcaattaacatcctttgctacttctttataaaaaaacatcacaaaaggaaaccaacatggaaccccaaaagttagaaaccagaagattaatattacatcctttagaaagtaaggattatatacaaattcaaaagatctttcctcagtgggaaattgttcgttatcttgtagcaagcaccccgtggccctacccagatgatggtgccctggaatatataaataagatcgcgctaccatcaatggcaaaaggaaatgcatggttttggactataagaaggagggatgaaccatcaataataataggaatgatatcgctatatgatcaagaaaataataatagaggtttctggctagacccacaatggcaccggaacggatttatgactgaggcggtccaagtcgttactgatttttggtttaataccctaaatcgcaatgtactcagagcgcctaaatccagcgacaatattgcctcaaagaaaatatcaattaaaagtggtatgcgattaataagactagaaaatagagactttgttagcggaagaatgccttcggaaacatgggaaataactcgtgatgagtggaatagaaataactaactaccatcgcgacggcaagggagtgaatccccgggagcatagataactatgtgaccggggtgaacgagtgcagccaacaaagaggcagcttgaaagataacgggtatatacccaatagatttcaagatgcatcgcgacggcaagggagagaatccccgggagcatagataactatgtgaccggggtgaacgagtgcagccaacaaagaggcagcttgaaagatgacgggtatatcataccaaagagatcacatgcgctatatcagcagatgtttttaactttcttatctcttcaaacagcattgttgcttcttcatattctttacgcaaataaccaagccactgtttaatccgagcaacatgatattgcccggtatcaccctgcttttccaatcggatatatttttgcaatagttgaacaacgtcctgccagcacatttttggttcgttatatttcaccactcggctcaaattaggaacgtgaagcgcaccccgcccaatcatgaccgcatcgcagcctgtcacactctggcaattctgcgcactttgccaatcccaaatttcaccgttagcgataaccggaatagagagacgttgacgaatttcaccaatcgcttgccagttaatacgctccgctcggtaaccatgctctttggttcgcccatgaactgtcatttccgtcgcacccgcctgttgtaccgcatcggcaatttcaaattgccgatcaccgctatcccaacccaagcgaaccttaaccgtcacaggcaaatgagcaggtaccgcttcacgtatcgctttcgctccctgataaatcagttcaggatcttttagcaacgttgctccgccaccgctaccattgaccgtttttgacgggcaaccgcaatttaaatcaaccccataggatcctaattcaatcgctcgtgccgcattttccgccagccactgtggatattgacccaaaagctgaatccgtaccaatgtgccggatggtgtccggctttggttacgtaattcaggacaaagtcgataaaaagattttaccggcaacaggctatcgacaacccgtaaaaattccgtaatgcacaaatcgtactcattgatttcactcagaagttccctaaccaaagagtccagcacaccttccatcggagccagtaaaacccgcatcgattaacctctgacgttaggcgatttatgggatacatcatgactgctgctacgctgacgcgaaggtgccccagaacggcgatggctatttttctgccgattatcgccacgtgcctgacgaccgttttggataggttcagccttgatcgttggatctggctcataaccgggaattgccatacggggaatctcccgttttaacaaacgctcaatatctttcaacagcttatgctcatcaacacagaccagagaaagtgcctgccctgttgcatctgctcggccagtacgaccaatacggtggacataatcttcagcgacattaggcaattcaaaattcaccacataaggcagttgatcaatgtccagaccacgggccgcaatatctgtcgctaccagcactctgatccggccatctttaaaatcagccagtgcacgggttctcgccccctgacttttattaccatgaatagccgaagccgttacaccatctttatttaactgttctgccaaacggttcgcgccatgtttggttcgggtaaataccagaacttgctgccagttacggctgccgatcaagaaagagagcagctcacctttacgctttttatcgacaaagtgaacaagctgttcaatctgttcagaagcagagttacgacgtgcaacttcaacactgacgggatcacgcaataacttactggctaagcttttgatatcgtcagagaaagtcgcggaaaacagtaaattttgccgtttcggtggtaatttattcagcactcgacgaatatcatgaataaaccccatatccagcatccggtcagcttcatccaataccaaaatttctacccgggataaatcaaccgcattttgatgttcaagatccagtaaccgccccggtgttgcgactaaaatatccacacccccacgcaatttcatcatctgagggttaatactgacaccgccaaaaacaaccagagagcgcagtctgaggtatttactgtagtcgcggacattttcacccacttgagcagccaattcacgagttggagtcaggattaatgctctgactggccggcgccctttcatctgaataggggaatcatttaaccgttgcagcatgggtaaggtaaaacctgcggttttacctgtgcctgtttgagcactcgctaataaatctttacctgctaatacaacaggaattgcctgttgttggattggtgtcggcgctgaataaccctgttcttcaacggcacgcaaaatatcagcacttaagccaagtgatttgaaattcataaataagaaatgctccagacttcaccattcctgaacgctattcaggggcagttttatgggaagaaaatcagacgtggtaaataccacaaaggaaaaaacacaactgcaatgctccatattttagctattataccagatatactttctgatgatgcaactaaaacaatagctatttacccggtaattttcatgatccataacatttttatgcaatttacattgatttactataagtatagagttaactaatgattgatattttgtttaagtcttttgattatttgcaacaggattcatgtcgatgtcagtcaacaacacccaaaccgccagaggcgaacaagccaaacaacagctactcgaagcagcccttgaaattttcggtaaatcaggactgaccggtgcaacgactagggaaattgcattacatgctcaacaaaacattgccgccatagcttattattttggctctaaagaggggctttatcaggcagttgcccagcatattactgacacaattaagactgagttcacgcatctttttaaggaaattgatgattttttttcatcatcagccccgtactcagcagaaaatatattgaggatgattcatgaaggattccttggcattaaccgcctgatgattgaaaaagagagtattaatatcagccggataatggccagagaacaacttgcaccaacggatgcttataccctaatccataagcaagcacttgtacctcttcacagcagattaaataaactgattgccagctatatcgatgccgatgaacatcagctttctaccatgctacacactcatgctttaatgggagaagttctcactttccgcatggcgagggaaacgttattacgtcagacaggctggaataatatcgggcccgaagaatataaattgattgatcagatccttatccagcatatcgatttattactgaatggactgaaaaaacataatctgaataaataaaataacagggaatatcatgtacaacaaaaaactcactctggcaatattggtgaccgcaattattcttagtgccattttaggcagttactattatcaaggtaaaagtgataaaactttgaccctctatggcaatgtagatatacgtactgttaatcttagtttccgggttggtggtaaactcgctagtctacaagttgatgaaggcgataccattgcggccaatcaagtcatcggccaactggataatgggccatttactaacgccctcaataaagcaaaagccactcgtgatagcactaaagcacgtttagccatgatggaagagggttatcgcacggaagaaattgcccaagtccgttcggaagtggcacaacgcgaggctgcctggcatttcgctaatagtttcttcaaacgccagcaaggtttgtggcaaagcaaagttatttcggctaacgaattagatgatgctaaaacgaatcacaatcaagcattagcggctttacaagccgctaaagataaactgaaccagttcgaaaccggttatcgtaaagaagaaattgcagaagctaaaggccagcttgctcaagccgaagcggctgttgctcaggctgaattggacttacaagatactcaactgacttccccctcatccggtactatcctgacccgcgccattgaaccaggcactatgctgtcagccggcaatacggtgtttaccctttctctgactgatccggtttgggtaagagcctatatcgctgaaagccatctcggacaggcaacgccagggcgtgaaattttactttataccgacagccgcaaagataaaccttatcacggcaaaattggctttgtttcacccaccgccgaatttacaccaaagaatgtagagacccccgatctacgtactgatctagtctatcggttgcgcattattgtcaccgacccggatgatgccctgcgtcaaggtatgccagttactctgcatttttctgattcagataaataaggggctgtcatgagcagctctgcatatacgataaggttagagaaagtcgaaaaaacttttcccagcctgaataatcctgcggtatccagcctgaccgcagagatctacggtggctccgttaccggccttgtcgggccggatggagcaggaaaaactacgctgatacgcatgttagcgggtttactgaaacccgatagcggttctattgagataatggggcttgacccgataaaagatggcgtacaagtgcgttttgaactgggctatatgccacagaaatttggcctgtatgaagatttaaccgtattagagaacctgaatctatatgcagatctgcgtggcgtactgggtgacgagcgtaaaaaaacctatgagcaactccttacgtttactgatctgacccgttttaccgggcgactggcgggcaaactttcaggcggcatgaagcaaaaactggggcttgcctgtactctgcttggcaaacccaaagttctgctgctggacgaacccggcgttggagttgacccgatagcccgccgcgaactctggcggatggttcacgaactggcagatgatgggatgctaatcctttggagtacttcttatctggatgaagctgaacagtgtcgtgatgtcctgttacttaatcaaggaaaactgctctacagcggacaaccacaaaaactgacccaaaagatgtccgggcgttcttttctgcttggtgccaaacaggattcccgtagaaaaatgctgcaacacgctcttaccttgccacaagtaaccgatggcgtgattcaggggaaatatgttcgtcttattctcaaacctgatgcctctccgcaagaattacttaatcagcttgaactgccagatgctgaaatcattaaagccgccccccgttttgaagatgcttttatcgatttactcggtgggggttccacccgccattcggaactggcagagatcatgccacgaattgctgctaacccggcagaaacagttattgaagcacaggatttaactaagaaatttggcgattttgctgccactgaccatgttgattttcaggtgaaacgtggagaaatctttggtctgcttggcccgaacggtgccggtaaatccaccacgtttaaaatgatgtgcgggctcatggtgccgactggcggtaaggcgctggtattgggaatggatctaaaaaccagctctgggaaagcccgccaacatttgggttatatggcgcagaaattttctctgtatggcaacctgacggttgaacagaacctgaaattcttttccggcatttacggcctgcaagggcgcaaacaaaaagaaaaaattgatggcatgatcgacgctttcaatctcaaatctgttttacatcaaaccaccgaccaattgcctctgggatataaacagcgtcttgccctttcctgcgcactgatgcatgagccagatattttgttcctggacgagccaacttcgggggttgatccgcagatacgacgggaattctggctacatatcaacggcatggtagataaaggcgttaccgttatggtgaccacccactttatggatgaagcagaatattgtgaccgaatagggttggtattccgcggtaaattaattgccgccggaacgcctgatgacttgaaacaattggttgctactgatgaaaatcctgacccatcaatggaacaggcatttattgatctggtcgttaattatgatgaggagctacaacaatgagtagcccaacgcaacatgctccacagcaagctgtccgcttctcttggtggcgattgaaagcactttgtgtaaaagagacaaaacagattttacgtgatcccaccagcggattaatttctattgtcattccattgattctgctgtttatctttggttacggtattaatctcgactccagtaccgtccgccttggtattctggtagagcagcaaagtgaagatgctcgtgaattaatacaggcttttgccggttcaccctatattgaacccaaaatcagcgataatcgtcagcaattaattaatatgatgcaatcaggagaaatacgtggactggttgtcattcctgttaatttcgatgcgcaacttgctcgtcctgatggtaaagcacaaattcaagtcattactgacggcagtgaacccaatacagcaagttttgtacaaaattatgctaaaggagtgtggcagatttggctacaacaaagagggcaagatcaggggaacgctgttaatccgttaattgatatgcaggttcgttattggttcaatccagcaacaattagccaacatttcatcattcccggcgcaataaccattatcatcaccgtggttggtgccattctgacatcattggtggttgcccgtgaatgggaacgcggtacgatggaagccctgctttcgactcaaattacccgcaccgaattactgctttctaaactcttgccttatcaagtgcttggatcattctccatgctgctctgtatgctggtggcaatatttgtgctggatgtcccctaccgaggctcgttatggatattgtctgcaatcactagcctttacttggctacggcccttggtattgggcttttgatctctacggtgacacgcaaccaatttaatgctgcaatgatagcgctgaatgtcgcttttctgcctgcgattatgctttccggcttcatctttgaaataaacagcatgcctgcctttattcaggtagtgacctatttcatcccggctcgttattttgtcagtagtttgcatactctctttctggctggaaatatcagtacggtactggtgataaatctattattactgatcgcctccgctattgtgtttattggcctgacagcatggaaaacccagcggcgtctggattaagaaggaattagcatgttttatcgtctttacactctgattattaaagaattgcaatctctactcagagatccgcaaacacgggctatcttagttatgccggttatcttccagatgatcttatttcctttatccgcaacccttgatgtgactaatgcaactattgctatttttgatgaagacaaaggcaaagcctctattgaactcacccaacggttggcaaaatcaaaagcatttcctgacgtgctattactgaaccattcacaagaaatacaaccggtaatcgatcaccaaaaagccttattactggtacggttcccacaagatttcagtgctaaaattgccagtcatgacccggtttccctccaagtattgctggatgggcgcaactctaacagcgctcaaattgccgcgggctatatccaagaaattgtccttaactatcaacaggagctgatgggtaacctgccgaaagccaataatagcgagttggtgatccgcaactggtataaccctaacttggattataaatggtttgtcgtgccctctttggtggcactgattactacggttgggatattaacagtcacggcactgtcaattgcgcgcgaaagggaacagggaacgctggatcaattactcgtttcacccatgaccacctggcagattttcattggcaaagccgttcctgcggtgattgtcgctacctttcaagcaactttagtgctcgccattggcatattctgctatcaaattcccttttctggttcactggcgctgttttactgcgctatgctgatctacagtttatcgctagtgggatttggcctgttaatctcttccctttgctacactcagcaacaggcgtttattggcgtatttgtctttatcatgcccgctatcttaatctccggttatatttctccggttgaaaatatgcccggatggttacaagacatcacctggattaatcctatctggcactttaacgacatcaccaagcaaatttatctcaaagatgccgatttcacggttatctggagaagtctatggcctcttttagccattactgccacaaccggtaatcttgcctattggttatttagacggaagattgcttaagtcaaagaatagaaatgaaatatataacctaccaccaaaatatcggtggtagacacctgtaagcctacgaaaagtcagcgtatttttatacagatattaaccaattgagccaattgggctgatattaaggagaaaccagactttagcttatacccgtcatctttcaagttgcctctttgttggctgcactcgctcactccggtcacatagtttgctatgctcccggggattcactcccttgccgccgcgatccatcttgaaatccatagggtatacatgacaatgatcatttctcagattttttattaactttataaaacagaaatagtaaaaatgatgataacactattatcgttaaaggcagaatataagattctttatatgaaaaaagaccggttataccaccaacaaacgcggctatgatttgatgaataaaaccaattaatgccatcacagaagaacctgttacaggtgttttatctgaggcaatagataaactgatcgggtagtttatcgcttgtccaagaacaactaagaaataagcactatatagtattatctccagaatgccccccacaatactcccaacaaacataaccacaccaccaataagaattaaaattattcctattttcatgagattagctctaccgcaatatactatgtatcgatttaaaattatcgctccaagtaaataagacatactgattggaatgcctataataccatattggctttccgaccaaccaaaattaaacttaaaaatcaatggagccataatattgaatgatataattgcaccatagccaattccaccaatgaaaaccgcatatatataatatttattttttaacaaattgatatatttatatactgaatttttttcatttttactatgattatatttttttgctgataacaacagcattgagattaatgctccaaaagccaaaacataaaatatagatttccatcccagaatagtcagtataacagaacctatcgattgcccaatgcccaaagaaatgacaaatgctatagataagtaagataatgcttttgccaactcatctcctctaaaattatcacgcaaaattgatcgggcaataacagaaactccaccagcgccaacaccctgaaagaacctaattaaaatcaaagaataaatattagttgatagcgtcacaccaacactacatgcaaataatataataagagcaaaaaacattgatttctttcccccccaaatatcacatattccgccccacaccagcattaatgaagccattccaattaagtatgatgaaagcatccatgaagtatggtttatatttaagtgtaaatctgacgcgatttcaggtacagcagggagatacatggtcataccaagttgggctataaaaatggatatacatggtattaataataaattttttttcatttttattaaccgataattgtcttgtacacttggaaaataattttaataagaagatttaatatggggtatgagatttttatcccctccccacaataaaattgtcttctttacgctacacttattagggagtttaaagtggcactctcttgatataaggactctcttaagaaatcagtaattaaataacaaaatcgtttaattaaatcactatccatatcagctctgagagtcactctaattgcagcccgcccttgaggaacgacagggaaaaaaactgacgatgtaaaaaagccattttcagctagaaatgcagccgttttatttgccaacgaagcatcaccacattgaattaatcgtattgcagtcgaactgccaaattgatctgtagttattaaactgtcaaataattgtatattttttttcaatttttcctgaagctctttaagctcaggcttgtaatgtatcctaattgaagctcttccagctcctattgccgctgaatttaagctctgagaccaattactcgggccaccatagcgatgaatgagtttcttttgattacgactacccaacatgactaaaccaccactggctgcaaatgatttagccaaagaagcaacgataatggagtcctcatccagctccttaatatgtgaccttacatatccacagcctttatctcctatagcagataaagcatgtgaatcatccaagtaggtgaataacccatatcgctcttttaaatacattattgaatttatgtcagcaacacctcccatactatatacaccatctgctacataaaccactttcttatgtattttacatatatcttcaagataacccatatcgttatgtggggctgttatcacctctgtttcatcagcacatgatggttttaaatgattcatagaataatgagaatatttgtcaaataccatcacagggtttacgtttccagtgaaaacacccgatgcaagcaaaggcaatatacctgaacttgcagaactacatgataatgtacttaaacattcggcattaaataacgctgacaattcccgttcataatcttctaagatggaaagtttacacctattcttcgagttaggtatacgaagtgacccagtttcttttatcgcgtctatagcaccatttaatatatctttatgataatccagaccaagatatgatgtagtacagaaatgatgaaactctcggccatattggtctgtcatataatttataccagatacctttacatctaaacctgatatcttattattttctgcattttcccaatcactttctgagatgttaataattttcttgtaatttataaatttattattgttcatataataaaccccattgaattctcttgtaagaatatcgtgaatcatggctcctatataataaaccttccctttgtagcaatttatattaccatgaatcaaaaatcaattaatcataaataatttatataaaatccatattaaccattataattacactacttatttaataataacaaaacattattatatttgaagtaataatgtctcagtaaataacctgagatttgcttaagaagggaattaagcgcctgagacacgatcaaagcttttgctaaagaaaacaaaatagtggagatcctcaggcatgtctaaaattgcttatacattccaacctaaaaaaaccgagcttgaatttacgggattgtgatatcgatatttttaaacaaagctgaggttaaatatgaattacgtggagttaatccgcattcaagacatgcttcatagatatttctcaccatcaactgttaaaccaatttaaaagaatcactcggtatgcaaaataaccatacctgttattcagatattattaattccataaatacttttttaatataagcgccagcacaattcataaaaatatatacccgtcatctttcaagttgcttctttgttggctgcactctctcaccccggtcacatcgttatctatgctcctggggattcgctcccttgccgccgcgatccatcttgaaatccatagggtataattgtgaatttttagatcaataaagcaatataattctttgttattagaaaataagcctaaaactcagtgtagctaaagttactttagctacactgaaaatatcaattaacggcgatcgccaaaaatacgcaataacatcaagaacatattgatgaagtctaaatacagcgtcaatgcaccaacaatagaaaatttacgcaaattctctttgtcattcacatccaaatcttcacccatctctttcagcttctgagtgtcgtaagcggttaagcccgcaaaaataacgacaccaatgtaggttaccgcccacgtcaacgcttcactctttaaccataagttaatcagagaagccaaaatgatgccgatcagccccataaataagaagctaccaaggccactcaggctacgtttggtggtatagccataaaaactcagcgcaccaaacatcccggccgtcacgacaaaagtgctcgcaacggagccaatagtatagataacgaaaatactggaaagcgtcaggccggtcagagctgaatagagcataaacaaccctgtggctaacgaagctcctatgcggttaatcatgccagagaggacgaaaaccaacccaaactgagcaataatcaacccataaaatagtattgaatttgagaaaatatataaaacaacattctgattttgtgacacataccaagccacaaacgcggttaacaacagaccacaagtcatccaaccataaacctgggccatataagtttgtaggccggttccagcttgctggattatcgaaccattagagcgtggatatcgatccatgaagcttaccttttataacgatattaaagacctaggttgttcagtaccaacaacccactcaagttttatacattatcatagaatataaacaaaacaattcactattcaataattactcatatagtaatccttttattcaatcctttttcgaagcgtttcgcagaatttaaccaatactttcattaccagcgtttcacggcttcctgatcgctctctcgggattcaacccaacgttcaccatcaggcaagaactcctttttccagaaaggtgcctgcgttttcaaaaaatccataataaattcagccgcttcaaaagccatatgacgatgagcaccggtcacacccacaaacacgatctcatcacccggatacaatgtaccaacccgatggacaacactgattcgctgcaacggccagcgactgcgtgcttcggtgacaatacgccgtaatgttttttccgtcattcccggatagtgttccaatctcagcgccccgacattatctcccaaattatgattgcggactttgccggtgaaagtgacaatagcaccatcttcatcacattgagcaagccattgatattcatcccctagcttgaaattcttcggcccaacgaaaatgcgggtgttttccatttattatcccccagtcaccggcgggaaaaaggccacttcatcgccatcctgtaatcggtgcccgccatgaaccagagattggtttaccgctgacaacaattttccattttccaatgccaaagcccaacgttctccctttgatattaacgccattctcaaactgtcaacggttgtgtaacgattatcgagatccagtgaatcagtacctaccagctcacgtacctgagcaaaaaacaggactttaatcattgctccaccttaaaatggcctaatttaccaccgattttctccagtaaacgcactggcccaatgaccatatctttctgtaccgctttacacatatcgtaaattgtcaaagccgcgactgacgccgctgtcagggcctccatttcaacaccggttttcccagtcagacgacaacaggattcaattctgacccggttatattttgtctgagcttccaactggacttctactttagtgagcagtaatggatgacacagcggaattaattcccatgtgcgcttggctgcttggatacccgcaatcctcgcggtggcaaatacatcacctttgtgatggcgaccttcaataatcatcgccagtgtttccggcttcattccaacaaacgcttctgcccgtgcctcgcgtgatgtttcagctttagcagaaacatcaaccatatgcgcttcaccggtagaattgatgtgggttaattgagacattctcagctcctgaaaaaacaacaatatccagacggtaaattaaccgccgatgacggaaagatttggcgtgataccgctgtcaccttgatgaagaaaatgggtttcccgtttatgccgcaatccatcctgaatacgcaatttcagatcatcgagttgtttttcactcgccaataagtcacgcagtggtatcccctgttcaccaaacaggcataaatgaagatgacctattgaagaaacacgtaatcgattacaactctgacaaaaatttttctcataaggcataattaaacccacttctccctgataatcaggatggctaaaaacctgtgcagggccatcactgcgtgaacgttgaagcaaatgccagccatcgagcagcaggcgttcccggataatttcccccgaaatgtggtattggcgaaacatttcaccaccgtcacccgtttccatcaattcgataaatcttagttgaatcggacgatcttttatccaatgcaggaaagccgacaggctgatatcgttaacatttttcatcagcaccacgttgactttcactttactaaaacccaccgcaaatgctgcatcaataccacgcatcacctgaaaaaatttgtcctgcccggtaatcgcatgaaattggcggggatcaagcgaatccatactgacattcactgcggttaaacccgcctctttccacttagcaatatctcgctccattcgataaccgttagtggttaccgcgagggttttaatcaacttattttcacgtatgacggaaataatatcggtgaaatcgcggcgcatggtcggttcaccccccgtcaaacggattttctcggtacccagatcggcaaatgcccggccaacaagacggatttcgggtaatgtcaaaaaggagtgatgtccacggggtttataaccatccggcaaacaataagtgcaccgaaaattacatacatcggtgattgatagccgcaaatagtaaaatttgcgggcaaaagcatctgtgagttgtttcaccataacacctttccaaacatgggagacgtgggcatttctgcctcacatcctggtgactcagtggtcacggccaaaacatcatatcgctgtgtaaaaagtgacttagatgcagaggctaggagttaattccatagggtatatgatttaatgtaaaacgaccttctgtgatatggattttagcgcttaacaaagaaaaatgcgaatacctactttcgttatataattgaatatataccttatggatttcaagatgcatcgcgacagcaagggagcaaatccaaggacaatttctatttgtgatcagttaaaacattgtacccaatcataacgtttgttcggttaatcgtgttttataataaattacgctaaaattattcagcgaatatatgctcagtcagtaataggaattctatgcgaaaccgcacattagccgatttagatcgggtagttgccttaggcggaggtcatggccttggacgcgttatgtcctctctttcatcactaggctctcgcctaacaggcattgtcaccacgacagataatggcggctcaaccggcaggatccggcgttcagaaggtggtattgcctggggtgatacccgcaattgtttaaatcagcttattaccgaacccagtgtcgcgtcggcaatgttcgaataccgtttcagtggcaatggcgaactggcagggcataatctggggaatctgatgcttaaagcgttagatcatctaagtgtcagaccccttgaggcaattaatttaatccgcagtttgttgaaagttaatgctcatcttattccaatgtctgagcagcccgttgacctgatggcgatagatgatcaaggcaacaccatttatggcgaagttaatgttgatcaattgaattgtattcctcaggagttgatgctttatccacctgcggccgcaacaaaagaggcattggatgctatcactcaagcagatctgattattatcggccctggcagcttcttcaccagtctgatgccattgcttctgcttgaagatctcacccaagcactgcgccgtagcaacgccaatatgatttatatcggtaaccttggcaaagaactcagtgccgcggccgctgaactgacactgaaagataagctggaaataatggaaaacaaaattggcagccggataattgatgcggtaattgttggcccgtgcacaaatatcagcgagcttaacgaccggattattactcagcaaatactcgaagcacaggatgttccctatcgccacgaccgtgaattattgcatcaggcgttagagaataccctgcaaaaccttgggtgacgttccctccgtaaagaaggtaccgcaaaagctctcctttatcagctaagattgaggctcccattccaaacgcggttccttcatgacgacatttacgacaactgatgctttccattcacaccggatgtcagaaaaatctacccaaaattgcggtttatttatcatgcggagaaagagcggcattttctgccttacgtagcatccagagactggagttccaataacaggcaataaatctctgcgggtttattttcaatgctggccttttgcgacaccctcgcattaggccaggatttacgaggcaattgttaaaaaaagccttttttatctatcagcgtggttttaaaagcgggtaaaaagtccgatgtcatgctgacattggaagagaaaacgtaacttgaaagatgacgggtatatcggtaaatcagtaatactgcccttcacttattttatatttacttaaccaaccatgactatttaaaaacacaaacagggagaggttaaatacttcattcaacagactgatttaacacaatgaatcaaatttttcagtagcgtgattaatgacatttaatcgaaatttactaatcattaaccgagagttgaaaagcaataataacgtgaaataacatcaatagaataaactgacatttaagtattttctcactatcattttacgaagcaatcaataaaaatgcgattaaagaagagataaaacgattaatttagctgaatttaagcactaaaaaggatttatcctaaaaaaacattaatggtatctctatactaaataacttttcataattataatacactcactctttttattctctgctattcctgtagggacatgaatttaaaaacgttttcactttctcaagcaattgccacatatactgacagccatgatttcgtgtcaccgtttcatgtaaggattgccacagacgctcaattttattcagccagggtgaataaacaggtaaaaacaacagattaaatttaggatgacaagccagccaatctctgacccgtcggcttttatggatactgtaattatccaaaatcaaagtgagggtttcagcatgacaatactggcgttcaagttcttccaatacattgataaataactgagaattcttatttaacccgtcagcataagtcacttttcccgtttgaacattcaggcaacctgcaaaataatgtttttggttttttcctggtgtcactatacgtttctgttgcccttttaaataccagtcagccccgatttttggattcagctcgatgtcgacttcatcttcataaaaaacgggatgtttttctgaacacgttgacaatgcctcggtaattttcgccattttttcatggtactcgggatcgggtaatttaagcgtcggggctgcccttcgccacacgatacccattttatgtaagtaacgatagaaggtactgatggataattttatgtttaataattcattgattttaattataaaaaactcaagactccagcgagaacgcaggcagcccaattgctggggagaatattgcaataaaaaagacagtaaaggataaagcgggattaaattccagacagcgggtctgcccacaggcaggcttttgagtccttccagaccatataaagtcaaccagtttatccagcgatagacagaagaacgactggcgcaaagggttttggcgaccagagagacagactcgcctcgatgcagcatcaatatggccatgagcctgcgagcataatctttatctcgggtgttctggataatttttttcatctggcgtcgttcattgcggggtataggtgctatgataggcataactcagtccgtttagtggtttgggattatctacaattgatcagattgcaaaaattggactgagttccctccaagtgttctactattttgaaaagttatttagaaaactatttattagtgatttaataaagaaaaaacaaagggtgatgttctataaaaacccacagaattgtcagtaaaacaatgtcggtaaaacagtgccagtaaaaataaatcggatatgattaacgttcgtttaaacgttaaaccacgatatatcataatgtttaaatttagcaaaaatcgaatatccaaaagataaaaaaagattaaaaccagataccgattaaaatcataggttaaaaaaataacttttaatcacagtttaaaacctgctccggttttatgggtatttcaattaaaggctttagcatttgatagttatgaccgtacctttaatcgacaagcgccggtcgggcaaccacaattaacaagatgcccctccagcgcgacaggtattccttgtatattaaacaagttagaaccttccgcaacagcgccagtttgtttacaggcgggacaaaacaccgggtcacctttacaggcaaccgatagttgttgatttaccaaatcggaaccctttaaaacctcacctccggttgttgtggtatcacctttaaggataacttttttactttccactacactgcgcattatttactccgttgtattttccgtttctcgtattaaatgccatgcagttgtgcccggttctgcaccttcaacatcaaaagccatcgccccctgagcaaagaagtactgcttgcccggcaggctctcggtttgccagatcccgctgaccagtgccggatgatcacctctcaacggggttacatgcagcggtccccggtcataacgggcataccaggccagggtagaagttgaattaaaatgcccttcaccatagaagtgcaatgaatggccttcacgaggtatcacccgtatcggacgtatcagttggttaatggcaaaataactctccgggacactgcccgggagtggcgttaagtccgggtattgaccggcctggataatcaggccatcacggtaagaagtaatcaccacatcccggtaggggcgcagcacctgacgtatccagaattctccacccagtcggtttacaaagcgtttggacagcagggtgatccaattaatgccacggatggagtgttcatactgtaataccgcagtatgaaccgtagaattgacttgcagggaggggtaacgttgcgctagctggtactctaaaggaaagtagtcatggtaatctctgggtagggccaagctgtagccacagtcaccactgtccggttcgagttgttcacacagaaaatccagccaggccataaaacgagccatgccgtcttgttcttttagataatcccaaggcagtgtcaggcttaggtaagagctatcatcgtcaccatcatcctcatcagaatccagataacgcatcagataacgaggggcttcatagatatttttagcatcactgactacccaactagagggctgattctttttctgattaagaatggcctcttccactttggcaatattttccggggaatatttttttagtccttccagctcatgactgtgaaaacgcagatgagtaccaaattcttcgcgaaagcggcggtagcaggccagaatgcgctgttttttctcctgagtatagccttgtttaaaaaacaaggtgatagaaatcccaagacgagaaacggtcagcccatcgccattgaggaaggtaaacgcggccagttgtgatttcaactgggcaaagtcatctacagtttccatcattttctccgtaagtgatgagtcggtggataatctgttattcccacatatttgccgcttcccgtatcagatgccagatagttgtacctgtctctgcaccttcaacatcaaaagccatcgccccctgagcaaagaagtactgcttgcccggcaggctctcggtttgccagatcccgctgaccagtgccggatgatcacctctcaaaggggttacatgcagcggtccccggtcataacgggcataccaagccagtgtggaaatatcatcaaaatgaccttctccataaaaatgcagtgaatcaccttctcccggaacaaaacgtatcgggcgtatcaactggttaatggcaaaataactctccgggacactacccggtagtggcgttaagtcagggtatttgcctgcgcggattatcagaccattggagtaagaactgatcaccacatccgggtagcgtgccagcgtgcagcgtatccaatattctccacccagtcggtttacaaatcgtttggacagcagggtgatccaattcatgcttcgtatggaatgggcataatcgtccagtgtggtgtgaacagtggaattgacttgcagggaagggtagcgcagggccagttggtactccaggggaaaataatcatagtagtctttgggtaagaccagacagtaaccacaatctccccagtcaggttcaagctgttcacacagaaaatccagccaggccataaaacgagccatgccttcttgttctttcaggtaatcccagggcagcactagactcaggtaggcgctactatcgtcaccatcatcctcatcagaatccagataacgcatcagataacgaggcgcttcatcttcgtttttagcatcactgacgacccaaccacaaggctgattttttttcctggcgagaatgccttcctctaccttaataatattttccggtgaatatttgcttaaccctttcagtgaatgactgtgaaaacgcagatgagtaccaaactcttcgcgaaagcggtgataacaggccagaatgcgctgttttttctcctgggtataaccctgtttaaaaaacagggttatcgagagacccaggcgggaaacagtcagtccatcgccattgagaaaaagaaaagaggtcagttgtgatctcagttgggcaaagtaatctacagtttccatattttctccgttaattatgaagcggtggcaaatgtcacactcgccaatattgccaagacggtggccaatgcagcggcgcttaccgcagcagcagcggctaaaatttccaccagtgcaatcagcgcggcagcgacggcaagggtgacaaggataacaatggcaacaccggcaataatcactaccatttccagcattccttcacccacctcttttaatatctgcatccagctaatgttttttagctcttccagggtgatgtccgaaccctgttgcacagtctgccaccgggcttttatctcactctccgtccaggtcacgatttttcccgtttgtgcactgacccaggaaaacgcatagctggcctgatggcttatcgggtcaataatctcttcacacacccacttcccagcttgatttaaccatgctccaaattgagcaaggagttcgcgggtactgtcgcggatataatccaacccttgttctgttaggccagccacctcctgcccgaggataacccagtcttcatagctgggtaaaaaagaccagggagaagtactgaccagcgggagtttttttgtcaacggctgcggaatagtccccggcataccctctgcgggaggagcgggtaaagcttcatcatcaggaggcgaaccgggcagcagcggggccagtgggatcggatttttatagtgttgggaactgggctgataaagttttcgccatgcttcatcatactgcttttgctcttctgtgcggttatcgtcgacacgcatcaccccgaagcgagagcgggtcgcaatccggatataatctttttcttgatcctcactaagcttatcccccggaaatttcacctcaatcaacatttttaggttatcggggtgtacggagccatcaaagtaagtagcatttctacctggccaacggagaacttcgtctttaaccaaaataatatcgggccgacggatacgtttaacaccaaatttttctacatcgtcggcagaaggccgggcaaatgggttactggattgcggtaagttatcactataacgctgtttagaggccagactggtcgccagcatgggcagaggtacatctttaggccctcggatagcaaacaccacttctgctttatagggccacaggaagtcatgcttaagctcctcaaccttaatcaacccactcataatgacttgattaagaaagcgaatagcgcccagtttggtgataatcattgccggcaggcgcagagcgtattcggcttttctcgccagataacagggatcttcatcggcaggaaagacccctatttccatcgtacagttaattgaggtcacggccgggcacatcttgccgctgttggatatcgtcatacttattcctccataaattccatcacatactctaccggcgtgttatcaccgacttcgcataaggttttcttcggtttcggtgaggcttccggtgaactcagttgcagattttcttccgcctcactctgtacagtcaccgttctgccctgcgcatcggttttaccggaaagggtctgaccgccagcagtggtaatggtatagcgggtatgcgccagcggcttaccgctctgttcactgagcagggtatagcgggcggagtagtcaaacagcgcaccggcggatttcttgccggtaatatggtcagtcatggtgatgctgaccccttcgatacggatattgcccatcgggtcaataactatctgcccgcctgcgttcccaatgatgatttgcccgctttcagagtgcaccgtgatatgtttacccacggtaatttgctggttatcggcgacgtttaattgatggcttttaccaatggaaatggcttgctgacctttaatagtcaccgtttgattctgaccgacttcaagcgtctggccgccctgtacggcttcatcatcatcgtttttaattatcgccgtgcggttatgcgccacttctgtttgctggtcatggcctatctgcgtggttttatcccggagaatctggctattcatatcccgctgagcatgaataaacacttcctctcttcctttgttatcctcaaagcgcagttcattaaatccctgccctccaagagtccgggttttaaaagtggtacgggttttctcccgcggtaaatcaagaggcggacggttgaggccgttataggtacaccccgtcacaatcggacggtcgatatcgccgttgagatagctgacgatcacctcctgcccgacgcgcggtatcgccataaaaccgaaaccgttgccgttccagccttgtgccacccgtacccaacaagacgcgttgtcgtccgctttatcgtaacggttccagtggaaatgaatccgtatcgcgccgtgttcgttcacataaatctcttcgcttcccaccccgaccaccgtggcaacttcatcaccgtccgccaggggtttgtagcggtaagggggccgccagtcctggtttccgggaataaaggcgacctcgttggtcagtgttgtcccttcgcctccgtcgtttgacgcgacaggttgccacccatgatgcgtgacagagatcacctgccagcgggcgttcatggcctctatgggatgggattgcagggtaaaaattttgcccggccgaagccggatacaattggttttggcggtgccgactttgctgtagtttcgtaactgttccagccgcagttgggtaaaaggttttccttcctcgtcccactggaaacgcccgtaactttcaaacaccgaatggtgcccgctatcgtcggattgcttctgatgctcaagagaatatttggggttaagaaagttatggtctttctggatcgtgccattcgaacacaggtattcgccataactccactggtacgccgtggtatcggtctcgtccgtttcaggatgcgtattgtaagtcagatcgatgtccgcctgcatgcccaggcggcaatcacagaacaacgtctgttcttcctcaaaccagaagataatgccctcttccgccgccagccggcaccagaaatcataggcggattcgcgtttttgcgtggtgtattcccgttcgacatggcgtttatagagcgtatcgcgggcaaagaaaatataatgctctttaagcaggatcgttaagatttccggtacagacttccgatggaaaatacggctatcctgattaagcgtcatcaaccacattttggggcggacagtgaaaatataaaaagtgctgcggccatcggtattaccctgttcagcgccggttatcatgccattaatggtccgttcggtgacgccattgcgggtaatggtcagtgacgcgctgtcccccagctgttcattcaggggaatgtcatcacgtgagctcaccacctttaacgtcaggcgataaagctgcgacagttcttcctgtaaagtaaattgcgctacctgaaaggtggtttggggcagtacgccaattcggcaggtgaaaactaatccatccatatttgaaaccctacataattgaaccattatcctgcaacggggataacgcaagaggctattaagcgagtcattacatgcggctcttttaaatagcgccggtctgttccgtggtaaaaaaatgacagcgtaaaatagccatcatttaatacgtggcgttagagagaacaatagaccgcttccagctaagtaggatggagtggagacaaataacagagaatttcgctctctaagtattatgaccacaagagcacgatatttatcagatgaatatgaaaagaatgtgattaatgtcacatgaaatggctaattaatcgctattaattccgatttttcatattgaattctttaattaatacatcgcctaatcgctcctttttcaatcgaaaaatttaggttataccctatggatttcaagatgcatcgcggcggcaagggagagaatccctgggagcatagagaactatgtgaccagggtgagtacagccaacaaagaggcaacttgaaagatgacgggtatatattgaagttcgatatttagcctgttatgggttgtcagccccaataacaggcaataaatctctgcgggtttattttcaatgctggccttttgcgacatcctcgcactgggcaaggatttacgggacaattgttaaaaattggcaataaattgctcacgcaatgcctgaacctgatcccgaacactagccgcctgttcgaattcaagatcctgcgcatgctggtacatcttcgcttccagctcgcggattttgctttccagctctttggcagacaggttgctgaatgtttccgctgtggcaaccgctttacctctgccctttcttttaccacccgctggctgcccaatttgcagaatatcattaattttcttattcagaccttttggaacaataccgtgtttttcattaaatatctgctgtttagcacgccggcgttccgtttcaccaatagcttttgccattgaatcagtgatcttatcgccataaaggatcgctttaccatgcaggttacgggcagcacgcccaatcgtctgaattaatgaacgttcagaccgcaagaaaccttctttatccgcatcaagaatagccaccagagaaacttctggcatatccagcccttccctcagcaagttaattcccactaatacatcaaactcacctaaacgaagatcccgaataatttccacacgttcgacagtatcgatatccgaatgcaaatagcgaacccgctcaccgtgttcttccaaatactccgttaagtcctctgccattcgcttagtcaacgtggtaaccagcacccgttcatttttcaccgcccgaatacggatttcagacagtaagtcatcaacctgtgtcgctacaggacgcacctccacttccggatcaagcaaaccagtaggacgcaccacctgttccaccacatcgccactggatttttccaattcatatttgcccggcgtagccgaaatataaatggtctgtggagccagtgcttcaaattcttcaaaccgaagtgggcgattatccagtgcagaaggcatacggaaaccatattccaccagcgtctctttgcgagaacgatcccctcgatacatcccaccaatttgcgggatggtaacgtgcgattcatccactaccagcaaaccatcagcagggagataatcaaacagtgtcggcggcggttccccttcagtgcggccagagaggtaacgggaataattttcaatgccggagcaataacccaattcattcatcatttccaaatcaaattgagtacgctgcgtaatacgctgttcttccagcagcttaccatttgccagcaataccttacgccgctgctcaagctcaattttaatcgcttccattgcctgaataatacgctcacgcggagtaacatagtgggttttcggataaacggtgtatcgtggaacatgatattgaacctgccctgttagcggatcaaacagtgataaccgttctacttcatcatcaaatagttcaacccgcagggcatgctcatcagattcagccggaaagatatcaatcacttcaccacgaaccctaaatgtccctcgctggaatgcctgatcattacgagtatattgcaattcagctaaacgccgcagaatagagcgttgatcaatcatcataccgttggtcaggtggagcatcattttcaggtaactatcaggatcacccaaaccataaatagccgatacagacgcaacgacaatcacatctcgccgctccagcaaagcttttgtcgcggacaggcgcatttgctcaatatgttcgttcacggaagcatctttttcgataaaagtatcggaactcggcacataagcttccggctggtaataatcgtaataggaaacaaagtactctacggaattttctgggaaaaagtccttcatttcgctgtaaagttgagccgccagtgtcttgttcggagcaagtaccatcgttggtcggtttaaattagctatcacattagcgacagtaaatgtcttacccgaccccgtgacccctagcaaagtctggtgggcaagcccatcttctaagccttcttgtaattgacggatggcctctggttgatcaccccccggttggaagtcagaatgtaatttgaacaccttactcatcggtatctcactttcctaacattgattcacatataatactggatataaaaccagcttcaagttggttttataaaaacggactcaaataggtcacttccctatcaattaaacattcgttgatatcaaaataaatcccattttatccccaaaattatcttgatttttctattttctatatgattggctgaaaggtgacaacatgggacatcatcacaggtcaggcaggtcttgattttagttatcttattgatatttaatacaattaaaacaaagacgagaataacatcaaccttgacgaaagccgcgtactttcttgcgtcgcgtaacttttctaagtctaatacacaaggttatccacaggaatagtggataactctacaaaccctattaactgtacgaggttgcaacatcatgccacaaaataggtatcctctaccgataaaaatttttactatttttttaacctttatctcaatacttcctctcaaaaaaatgaataaatttgctgaaaaagtaagaattttctcatagaaattaaatatcaataaattatattcgttcaatattacccgcattaaagatagataattgtctattttttctgtagactgagcgaaaaaaactgtcttttctgcaccaaacaacagtaaacaatatggattagattagaatttttattcaataagaagtagccagtgaacagtttccgtatgaaatctgttcttcaagaggggagtcgtgttttacctaagcggaaataggatgctctactttcagcaatagcaggctcaagatcatcaatagcatttttgactatgccgatataagcaataccgatataaacaatgccgatataaattataccgataaatatttacccaaaaaaactagcttaattggcgtgagtaaaacccgatttttaattaggacattaatatatgtccttgataaattaatgaattcacatcaacatatcctctattttacaaaatgagctccatcgcgaccgctcaaaaaaaatgatagatacataaatatcaaatcgacatagccttcgtaaaacgtccaatattctgctggctattttcgatcgaaaaacttactttgtatctatcattcacaatttcaatcgattgctgttccaaagcatctttatactgccatttcctggtgttttaaccgtgttatcattttattaatttactaatttcagtcctaatgtttatttaacttcctctattttcttgaatattccctagtgctaaaaaaataacccacttccaaactcgaaggataaagtagctcttccccgagagatttataataagaataatattttgtttgatgctatctgataaaccaaaaacacatcaacacaacttaacattattataataaaatccataaagtcaacacaaaaataaacataaagttcagttttgtgtaaactttataatgaatttcacttaattccatgatttaactttcgtttttagaatataaaggtaaatccatgagccttttctgatataggatgtgctaatatagataatcataaaaataagatattaaaagtaaaatcaataaattatcacaatgggtggttttttcacactggacaataccatcaagtaatatatagtaatgctgttatctttatataaaggattctcatgaaaacgtctaatgcacagcgaaaaacaaatatcattaaaaatatagaatatttgatacgtacccgtggagaaaccaagagctctttttccaatcgaacaggattgacccgtaccaccatttataaaatcctggaaggacaagtcaataacgttcaacaatctactgttcttcggatttccgattttttcggtgtctcctgtgaagaaatagaatattatgaccttgaacaattagagcgcctcaatgaaacactttcaaccgaaggcaataaaaatccttcggctatccctatcgttccccaatctgaatttttagccgtttctgagaaaaaaataggtcagcttgttaccgagtatccgctgacctatttctttggtgatgaatcaaacatgttggctcttaaagtcgaatcggcaatagaagatacattcatacccggtgaggtgatcatcataaaacgtccccccgcattagtcaccaatacgccattattgtattacgctaaggaaattgggttctttatccggcaagagaaaaatgatgacagcctcgataggaaaccctacagaaatgctcattttttgggctatattgtaggagaaagactataaatgacagcaaatcaaaagtttaagttactgggattttcaaggtatggtaaattatcggcaaatgtcatggtgctagcgacaggtaagaccattactatggggttaaaagagctcgttgacagtgatatttcagaagatctgagcagacatgagctcagtacgatataccggaaactatacagccacagtaatatcgtaaccgcttatgaacttggggaccgtcatgaacgttcatggcaagcctatttactcattagcatcgcactcagtgttatctatattttctctaccatatgtggtgtgaaacccattcatatcccgatccttaatattgtcacgcctcctggggtttttatttaccctataactttcttactggtcgatattctaaacgaattctatggattacgtctggcaagaagaacgattattatctcttttgctgcgaacttattatttgttctagggctttggggaaccgcactgatgccgggtgttcctggatgggaatttggtgcgacttataatggaatagtgaatagtatcgtatctgtattactggcatcatctcttgcttattttatctctgagaatataaactcgtatctcctctgcaaaataaaatctctcacaaactcaaagtatcttttcctgcgagtaataaccagtactgttatcgcttcagcattcgacagtataatattctgttcaatcgctttctatggtgttctcggcatagacatcataaaagaaatgattatcgcccagttcctcattaaagtggcttattctatcctgggtgtaggccctatttatctggtaaggaagatattcagaaattatataaatcgaccagaagatacaccagtgaataaaaaactcgctgaagtataaatagagataacgttttgtcagaatagagaaaagtcgttgaaaagtatcatttttatgccggaatgttattccggcatattgtgctaaaataaccctttatatatctataccctatggatttcaaaatgcatcgcggcggcaagggagcaaatccccgggagcatagagaactatgtgaccggggtgagtgagtgcagccaacaaagaagcaacttgaaagatgacgggtatatcatcaacagtaaaacatagatatgaataatgtaatcattcatcatgacattgaaagaatattctaccagattaaattttcaaattaattattcagtaattttaaatctatatattcccctaaatgattaaaatattcttgcgttaaatgaggaatcgtacctaataaaggagccggtaacatccgctctaatgtcgccaaatattcttgctgacgtttgcctgcgggttcaacctcattagctatccagcctgcaaaatgtaatcctgaacctataatagcctccacggtaagtatcgcatgattaatacagcccaacttcactcccactgccaaaataaccggcagttgctctttaaccacccagtcagcaaaagtcaccgattctgataaaggggtataccaaccacccgcgccctcaactaaaacccagtctgctttcttttctaactgatgtaaccccatagacataacagtaaaatcaataggttgattcgaatcatcactggcaatatggggtgatgttgcttcaacaaatactaacggattcacttcttcatattgcaaagatacagaactatttgccagcaatgccactgcatcagcattacgaacacctgccggtgttatttcactaccagaagcaacgggtttataacctgctgttttatatcctgctttagttgccgcttgtaacaaagcgcaacttacaactgttttccccacttcggtatctgtacccgtcaaaaaccagcgcttagtcacgatgaatcactccaaaaaccacctgatagctaagaggtaactgttcgttttctcgtggataagcctgttccagagcaatcagtcgtccacgcgtcatcagtccttgctgtcgcccatcatgaaggtgagtcgcaccaatccctttcagagaacccaatagcggcaatatatgagaatattgctggcgataaacctgactaataagacaatgccggaacccttgacaggcatctttaattgtctgttgcggcaggaactgattaatatgctggtagttatcaaccacactccaagcttgcttcaattcatacaatgaacctttagctaaggtggaaaatagaattaatccaccaggacgggttacccgataaagttctcttaaagcactggataaatcatcacaccactgaacaaccagattactgaaacagatatcaacactgttgtcagcaagccctaaatgttcaatatccgcttgtaaataatagtcagccgccaattgcttacgggcatgagctaacatgcctgatgccaaatccagcccaataacctgcttcccctgttgtcgccagcggtgactaaaaaaaccggtaccgcaacctgcatccaatactaatttgccggaatgctcaccaacttgttgcatgaggaattcaccggtttgctgctgtaatttcgctaccacatcataattggcggccgctcgtccaaacgctcccgcaatcgcctgtttattggcaaattcagctacggaacccatgcaacgcctccatcaacatatcaatatcctgtggcatatggctggccgtcaaagtaatacgtaatctggcgctgcccggcggtactgttggtggacggatcgctttaacccaaatccctttttgttgcagagactgagacaaggacacactcaactcattatcactcacaatcaatggctgaattgcggtggttgaatctgtcagattgaacggcagtttctgagcttgccggcggaagtaattgatattctgctgtaatcgttggcgcaattcatcaccagattgtatctgccgaacagcttcagaaagcgcctgagcctgtgccggaggcatagaggtgctgtagatcagatgacgggcatactgaattaggtattctgctgtctgctcatcacaaagcaccgccgcaccactcaacccaaatgctttgccaaaagtgacaatcaggatttctggttttactttctgttgccagcagcttccccttccctgctcaccacaaacaccaataccgtgagcatcatccaccattaaccagttgccagaaattctggtttgctgatgaatatcggctagcggtgcgcagtcaccatccatgctgaatacaccttcggttaccaccagcgtctttccaacacaaggcgttgccagtaaatttgcaagtgattcaggttgattatgcagaaaacgccgtagctgagcgggggaatgcatcgccgcttccattaatgaagcatgactcagacgatcagcaataatccgatcctgttccgtcattaacgcggcaatgaccccctgattagcagaataccccgaaataaacagtaatgcttttggatagcccaaccagtcagccaattgttgttccaatagctgatgagcctttgtataacccgtaatatgacctgaacctccactaccaacaccatattgttcagctccccgctgccatgcggaaataattgcgggatttgcacttaacccaaggtaatcattactggaaaaattaagatatttgccatcagcggcatacaggaaacgcccatctgatttctgattgacctgccgctgacgccatagcgaagtgctccgacgctcagacaactgtcgggaaagataagatgaccagtccattataatgccgcattataaaattgttcgttatccgcattgataatggcttccgccaaatgctgctgttgctgattatcaccaaatgctgtctgagtctgctgaagattaatgcccaacttgcgaaatagttgtaaatctttatcttccgccgggttaggtgtagtgagcaacttacagccatagaaaatagaattagcgccagccataaaacacattgcctgtgtctgctcgttcatctgttcacgacctgcggataaccgaacatgagaagacggcatcatgatcctggcaacagcaatcgtgcggataaaatcgaaaggatctacatcttcgttctcagccaatggcgtacctttgactttaaccaacatgttgatgggtacactctccggcggttttggcagatttgccagttgtaccaataatgcggcccgatcacgtatcgcctcacccagaccaacaataccaccagaacacacttttattccggcctcccgtactttatccagggtatccaatctgtcctgataggtccgagttgtaatgatgttgccataaaattccggggaggtatccaggttgtggttgtagtaatctaaccctgcatccgccaaccgctgtgcttgtaagccattgagcatgcccagtgtcatgcaggtttccattcccaatgctttgacttccttaaccattttctccagataaggcatatccctctcatggggatttttccacgcggcacccatacaaaaacgtgttgaacccgcatttttagccttacgagcagaatcaatcacctgttccacttccatcaaccgctctttttcaagacctgttttgtaacgggagctttgcgggcaatatttgcaatcttccgggcaagccccggttttgatggaaagtagtgtactgacctgtacttgctgtgggtcaaagtaaatacgatgaacctgctgtgcttgaaataataattcgaaaaaaggtttatcaaacagctcttgcgcctgcttaattgtccattgcttacgctcaatcacaataacatctccaatgtgaaaaaagtctagtcagtttaaataatgccgttatactgtcaaccaattttaataaaattggtttacgtcaagccttatgaccccttccgatattgaatttgatctacgccatatttggcacccctacacctccatgaccaaccctcttccagtttaccctgtcgttggcgcttctggggtggaactggagttggctgatggccgtaagctggtggatggtatgtcttcctggtgggccgccattcatggatataaccatccggtactgaaccaagccgctaaaattcagcttgatcagatgtcccatgtcatgtttggtggaattacccatccgcccgccatcgcactttgcagacaattaatagcaatctccccgctatcactggaatgtgtctttctagcggattcaggttctgtcgcagtggaagtggcgttaaaaatggcgttgcaatactggcaagcaaaaggtgaaaaacgtcagcgtattttgacattacgccacggttaccacggtgacacattcggcgctatgtctgtctgtgatcccgacaattcaatgcataatctctacaaaggctatctgcccactcatctgtttgctgaatcgcctcagtgcggatttgattcgcaatgggatccacgggatatcatgccatttcgtactttgctggagcagcattccggtgatattgccgcagtgatccttgaacctatcgtacagggtgccggcggaatgcgaatttatcatcctgaatatctgcgtcaggtcagaatgctttgcgatcagcatcagatcctattaattgcagatgaaattgccaccggctttggccgcacaggaaaattgtttgcttgtgaacatgctgaaattgagccagatattttatgtgtagggaaagcgctgacaggcggctatatgacactatcagcaacactgacaacccgtaaggtagctgaaacaattagcaatggtgaagcaggctgttttatgcatggcccaacgtttatgggcaatccattagcttgtgccgtagcaaaagccagtttgaacttattattacaaagcccttggcaacaacgtattaaatcaattgaaaaccaattaaagagtgagttgatgccactaaaacatcatgcaaaagtggctgatgttcgggtattaggtgcaattggcgtcgtggaaatgaatcaacccgtgaatatggcggtgctacaacactattttgtttctcaaagtgtctggataagaccatttggcaagctgatttatttgatgccgccttatattattcagccagagcagctttcacgcctgacaaaggccgtttctggcgcaattaatttgtaatttttcttgtattaaataaattctgctgaatttattgctgagcagttaatagagctaagtttcattctgtacttataccctatggatttcaagatgcatcgcgacgacaagggagtgaatccccgggaacatataactatgtggctggggtgagcgagtgcaaccaacaaagaggcaactcgaaagatgacgggtatatatggcctttccttcatgtcatatctgtaggtaccaaaaccaattccatttcatctgcaagctctctaagtttttcgttaacctctttagaagtagcggcggactctgattcaagagacacatgcaaatctttttcttccacccgatctccaaaaattattattgctttaccgccgtgctgcttagagggccatcgaattgcttgagcatcaggattgtcatgataaatttttgctgcccagagctgagtaatatgataatccgatgcttctgattctactagttgaccttgaataatcccccatttcttcaatattcgtgggttgatatccacatacttgatgtctttttttggcgtaatttggctatacgctaaatcatctagtttactcagttcaacaggtataccggcgcaatttagtggaatatcatgcaaaatcgtctccataatagcgactcctacgttttcacctccatagagtgttggaacaaagattccattatttttgaacgggctaaaacgggcattaccaacaccaggattaaattcagcgcctttaaactcggctttatgaatacgttcaataggtgtacccgctttccacttttggattttggctgctgtattctctgggggaagcggtatatcttcttgaaattcttttttatcatcaaccatgacgcggcccttcagcttcttctttggctgccatataaacatcatcaggttgagttaatacaaggtcctttggttttttattaccaagccagctatttggtgtgccgaaccaaatagccattgaccaaggggtctttttgtctccaaacagcgcaatagttttctttatcactggtaacggttggccgccttcgtctagagcatacaatgggaataggtctttgccattaattggcaatgcgaatatttttttcgactttttcaaacgatttgccgcagcgctggaattcattgatttagatccggccaatttgctaagttcacttgcagtcagccactctgaatcagtaatgatctgattttttaatttttcaaggcgtgcttcattacgggaagcaaatccaatttttgaagatggttcggtcataacagaccgatgtttattcttattgaatgtagtgacagcggttactgcactagctattgccaacttaatatcatgataatcaattgcttttggcaactttattaccacatactgatctgcctcatcagcgggaatttcagacaaattgatatgtttggcaacatccttgtcatttgataactcaattgaaagaaagtcaaagctaacattctccgatttggattgcgatttagtcatcatactgcctccctactgcatctgtttgagttcgtattttgcgtattttcgttatatggatgatattgcgtatttgttaaaagtacaaggattggtgtaattgcatcacacgaggcttccatcaaagcgctttcaacgggattttgtcgtgaatatcacatgcacaacccgttcggcgcggtccgttttgcgtataacaaggcgctgcacatcaaaaagcatgcttatagaagtcacgatgtgagtttaaatccgcgcaaagacctcaaaccgctactagcggtcgcgaaaaaatcacgcaaatacgcctctgctcaaggtatgtgacgccatcacgttacagcaggcgggaaataatcactggatgagtttagtgaaaccgggcagacatagaaaaccatttttgcatctgtccggttgaataactgcaagatttggtgttgcattagctcaaacttgatctggtgcctaccggttatttgcatcaatgcctatcaaattaaaccgtaaaccagcacacacgatcaccattaacatccaacaatcttatcaaattcacagggccagcaccgttacccacattgggcctttacctactggatagcgcgtcaattcagtcaatttaccggtatatttatcaatagaagagactgaaatatggtcagacttttgaccggatgcaatcagatattttccactgtgatcgatagcaaaaccacgcggctgaatttcagttttatagtgtcctgccagcgtcaaattagaaccatcttgcgaaataacaaaatggctgatcaaacttgaagtccgttcactggtataaaggtgacgaccatccggtgtaatatgaatatccgcagaccaacgaactcccgctaaatctgccggcaatgaatcaaccgtctgaacagtccgatatttttcccacttgcgataaacatccactgtagaatccagttcattaatacaataaatcacctgctgatttggatgaaatgccatatgacgagggcccgcacccattgcggtagtgatttcctcagcacgtttttctgtcagataaccctcttttgccatctcaaaaatacggacgcgatcttctttcagacaaggaaccaatagttgtttattatcccagtcaatattagccgaatgcggtgcttgcaaaccggcaataacctgaacaggttcacccacaataccttgatcatcaattaggctgacactcaaattgttataactataggaggcagagaatagaaaacggccctgtttatcagtagagatatgagtcgggctacccggtattgatgaaatcccctgttgtgccagttcccctctagagccaatctggtaagtgacaatactgaattgtggccggatgccaacataaagatgtttacgatccgggctaaccaccattggttgtacttcccccggtacatcaactgtctgaatcagtgataactcaccttcattattcaggctccaaacatgaatctgacaactgtttggactcgccgtataaaccacttgtttcatcttcactccttaattatccatgaccattttattgtgctgtaacgactcgattggttttatcggttaaactcaccgcacaattggtgtagctttattcagtttcaatgtaatatccttacattatatatagttatgaggctaatttatgtcatatcgcatcattgcactggatctggatggtacactactcgatcctcaaaaaaatatcctacccgaatcactcattgtactaaacgaagcacgtaaagctggtattaaggtgctaattgctactggccgtcatcatgttgctatccaccctttttatcagactttgcagctcgacacgcctgccatctgctgtaatggtacttatctgtatgattaccatgaaaagagcgttttaacctcagatccactgtcaactcaagaagctataaaagttctcagccacttaaaaaacacagatattcaccgtctgatgtatgtagatgatgccatgttatatgaagaaccgtatgacacagttgtccgtaccataaaatggtctgaaaccctacctgaatctcaacgcccaactgtgcgacatgttaatagctttcaacatgctattgacgaagtacaatctatctggaaatttacaacctgttctcctgatttagtaaaactgcgggaagtgactgcacaaatcgcaaatgacacaggtctttcgtgtgaatggtcatggttcgatcaggtggatattgccaagaaaggtaacagcaaaggtatgcgtttgaaacagtgggttgaatcacagggaatgaagatgaaagatgttattgcttttggtgataactttaatgatctgagcatgctgaaagccgccggactcggtgtcgctatgggtaacagtgtggatgcgattaaagaacaagccgatttggtgacgctggataatactcagccaggtattgccgaagttattcgcaagtatgttctttaattgcttgtctgacaagattactgtgcggggaaccttccgataagctccccttttcctttgctatttatagcagagactacagttgccgatgaaaagaaacactttttatctgggcataaagccactgcccagaccgcaaattaagttcatcccttgcccacggagtgatccttgcccataaatagtggccactcaacaccaatttgacatcaacgtgtccattatcatcaaagaattcaaccacttttaccgctaaaatattacggatactactgccgcgaggaggttccagtactaatgaaacatctgacgcatctattctgatacgcaaatcagttcccggttgaacatccattttcggcaaccataaagcctggtcagcgagtgccaccgcggtcatttcataacgattatgatgttcaaccattgaaacattcagaatactgctaagcgtctctttttgtaaccaaagacgtaatgcactactggaccaaacctcttccaattttcccgttgccctgacttttccgttatccacgacgagtacattttctgccagacgaagaatctcatccagattatggctgacatataaaatcgggatgttgacctctccagaaagcttttcaagataaggcagtagttctcttttacgagggagatccagcgatgccaacggttcatccattaacaacagatccggtgccgtcaataaagcacgaccgatagcaacccgctgcttttcaccgccggacaaggtaagaggaaaacgagatagtaagtgctcaattccaagcaaactaacaatgctatcaaattctggcttcatctccggcgacatcccgtattgcagattaccctttactcgataatgcggaaaaagccgggcatcctgaaaaacatagcctatacgacgctgctctggtgacaagcagatacctttttcaatatcaaccaacacatgatcattaaggacaatccgccctttccgtgggcgtatcaaaccagcgataacatttatcagtgaagttttcccggcacctgaaaggccaaaaacagccgtgatcccctcagtgggtagctgtgtattgacctgtaaataaagatcaccaagttgttgctcaaaatccagctctaacatgttgctcccaaacgtctcctgccccaacgggttaaccattcagaaaccatcagtgacatcaacgctagaataatggcaatgatgcacaaacgagccgcagccgtttctgctccaggtgtttcaatcaaggtatacattgccagagggatcgtccgcgtttcgcctggaatattggatacaaaagtgatagttgcgccaaattcacccaatgaacgggcaaatgccaacacagtacccacaataaccccaggcaaagagagcggcaatgtgatagtaaaaaataccttaaacggattcgcgcccaaggtacgagcagcctgttccagccgccgatcaacaccttccagcgccagacgtatcgccctgaccatcaacggaaaagcaacaatagcagaagccagtgcagcaccacgccaactaaatgcaaagctgatgccaaaccagtcatataaccattcaccgataaatccacgacgtcccatactgatcagcagcaaataacccactaccacgggtggtaacaccagcggcagatggataatgctgtcaagtaatgatttaccgggaaactggaaacgagcaagaatccatgccatcaagatcccaaatggcagactaagtaacactgccataccggacactttcagactcaggatgatggcttgccattcgtattcactcaacatcgccaaaaaatctatacccgtcatctttcaagttgcctctttgttggctgcactctctcaccccggtcacatagtttgctatgctcccggggattcgttcccttgccgtcgcgatgcagcttgaaatccatagggtatattcctaacgtgggtgaaaaccataacgtttaaaaatttcaacggctttaggggttttcaaatattcataaaaatcgagaacggtgagattactatgatctttgataatcgccattgggtactcaataggtttgtggctctcttccgggaaaacccccaccactttgactttatcactggcaacggcatccgagccataaacaatgcccaatggaacttcagcacgctccaccagcgccaaaccactgcgcacattactggtacgcgccagcagaggattaaccctctcccatgcccccaaatattgcagagactctttagcgtaaatgcccacaggaacatgatctgggtcaccaacagcaagacgcccatcctctaataaggatttccatttggtttctttattaatatcaactttattgagtctactcgctttcggtgcaatcagaacgagttgatttcccaacatagtcaaccgagtttcatcaataatcagtttcttcccggcaacataatccatccactgttgatcagcggaaataaaaatatctgccggcgcaccttgctcaatctggcgagccaaaatggaagatgcagcataagaagccaccacttcaccttttttctctcgcttatacagcgccgcaatatcatcaagtgcattagtcaacgaggcagcagcgaataacgtgactttttcggtagcccacgcttgccacgtcaaagcaaaagaaacgacaacgccgactagcagtttgccaaaactctttttcatttgttttccacctgtttcttacctattagttcgtcgtgtatagcaagatatatccgtcatctttcaagttgcctctttgttggctgcactcgctcaccccggtcacatagtttgctatgctcccggggattcactcccttgccgtcgcgatccatcttgaaatccataggatatataacgtcaattggaagagtattccaatattaatcggcaaattgtaagcaatttttactgtctaatttaattcgaagtaaaatactgtaataggaaaaccaaatgaataaaatggaattgattatgattaattaagacaaattacccggttaatcaccgggtaatcagaatagcatctggtgtaaaagaaatattagttttacttttcagaacgaccaatacgggaaacgatattaaacagttccccaagaccataaattaaacctaaaattccgaccgtcactaccggtaccatgaccagggcgaaagccatacttttaatcaactcaaacatggtagcctcacacaatggctcatttaatgagcccgcaacataacacatttttaaccatagcgggtaataccgctataattagtaccattctagacaaagacagacaactgtaaccggctaaacgtgcgtttttctggttagcctataaaaatttacgattatatttactaaaaaaaactatcatgcaagccgaaattctactgacactgaaattacaacaacggttattcgccgatccacggcgaatattattactaaaacagattaaagcaacgggttctatcagtcagggagccaaacaggccggtatcagttataaaagcgcctgggacgcaattaacgaaatgaatcaactggcagacgaaatactggtagagcgtgctacaggaggtaaaggaggcggcgggacaaatcttacccattatggcgaacgtctattgcaactttacgatctactgacacaaattcagcaaaaagcctttgatatgctaaaagatgaccaacttcccctcgacagtctgttagcggccatttgccgtttttctctgcaaaccagcgcccgcaaccaattctttggcacaattactgaccgtaaccataatcaggtccagcaacatatccgcatcttgctgacagatggtcaaacatcactgaatgcggcattaacagaacaaagcgctaaccgtcttggcttggtaaaaggtaaggaggtattggcgctcattaaagcaccttgggtgaagctcactaaagagccattctctatcggtcatttcgacaatgccctgacagggcagatcagtaatattgaaaccagcgaagagaacaccgaaattatcattgttcttgatggcggtgaaatcctctgttctactctgcccaatcaagaagcaaataacctgaaactacattctggagataaaatcactgcactttttaatgctgaccaggtgattattgcaactctgtgttaagaattgactctattatcactgaacaattcggaatatccaggaatattatggtgttacgtaccttacacctcccctagtgtccaatattaaatgttaattaaaagttaatattgacattccgcgccattccgcttatttgtggaaaaatatttgcgttgcttaaaaaggaataaaagatgtctgaattgcaaataacgcaaggctgtttccgtttaagtgatacccgtaccttgcagttatcatcactaaaaatagcctccggcgaaaattgggcttttattggtgcaaatggtagcggaaaatcatcattggcccgtgcgctttcaaatgaattagtcctgctttccggcgaacgaaattgctcatttcgcaagtgcgcccgcgtctctctagaacaattacaaaaactgacggaagaagagtggcaacgtaataatagtgatatgctcagtgatgatgaagatgataccggccgcactgcggcagaaattatccagctttatcataaagataatgaactttgcctggaactggcaaaacagttcggtattatggatttactttcccgtcgttttaaatatctttctactggtgaaacccacaagacattactttgccaggcactgatgacttcacctgatttgctgattcttgatgaaccttttaatggccttgatctattttcccgtggtcaattcactgaattactggaaaaattgtcatcaaaaggaatcgttttggtacttatccttaaccggttcagtgaaatcccagattttgttgatcagattggcgtactagcagattgccagctaacctctattggcaccaaagaaaaagtgatggcagattccttggtggctcaactggcacacagtgaaaaactgaacggtattcatttacctgaaacagatgaatttcctgtcgataatcagctaccgcccgatcaaccgctgattattctacgtaatggtatcgttcagtataatgatcagccaattttgcatgggctagattggcaagtgaattcaggtgaacattggcaaattattggcccaaatggtgccggaaaatcaacgcttctgagtttgattaccggagatcatcctcaaggctacagtaataagctgatcctgtttggccgtcaacgcggtagcggcgaaaccatttgggatatcaaacgccatattggctatattagcaacagcattcatctggaatatcgtgtcagtatcagcgttcgtaatgtgattctgtccggtttcttcgattcaattggtctttatcagacagtatcagatcgccagcagcaacttgctgatgaatggctggctttactgggcttatctgctcagattgccaacggcccgtttcaccgcctttcatggggacaacaacgacttgttctgatagctcgcgcactggttaaacatccggctttattaatccttgatgaacctctccaagggcttgatccactcaaccgccagttagtattacgttttattgatgtcatgatcgctgacggtgatactcagctactgtttgtttctcatcatcaagaagatgcgccgcaatgcattactcaccgactaatatttatccctgatggtgatctatactgctacaaaacagagaaagtttctgattgatttctgatagttccccgttatgcggggatcttaatgagtctataccctatggatttcaagatgcatcgcgacggcaagggggtgaatccccgggagcatagataacgatgtgaccggggtgagcgagtgcagccaacaaagaggcaacttgaaggataacgggtatagccaattttcatcacggccatttctattagtaccttaataaggtgattaatccttgaccaaagagtctgaattaaggaacgatgattaccagcataaaaacttctccgaccagtgaaaaaaacatcgcaatttagttatcatgcattattatttttgctcactaaataacatctatcattaatttttggtctgcttttcagagccttttttaatttgttaaaaataaagggaaatatatgatttggggtttacttactacatcactagcgttattagctatacaccgcactactgcactgattgttctactggccgcagttattaccggatttgtcacacaaactgtgatttatccggcagtcgccactattgcgattatttttttgttaggtgcgctacgtattcattttcaacaaaataacatcattaaaatcacaactgaactgctattactcgcctttgcggtggcattattcctacatctgctccccggttttaataacctgaaatatctcgataaagttcaggcaggccctcacagtgccccattctcaatgtatttcaactttgacaaagccctcattcctttcctgctgttatgttgcatgcctagcctatttacaacaaagccactgaccaaaattcggccttatgcatggataatcttagctattgctattcctgtattgttaagcatagcaacggctctcggagggctcgcagttgaattgcacatgccacaatggttaccgatgtttatattggccaatattttcttcatttctctggcagaagaagcgctattccgaggttatatccaacagagattgagtcagtggattaacccctattttgccctgatcatcactgctttgatttttggtggcgcacacttcgctggcggcccattactgatgatatttgctgcacttgccggattaatatatgggctggcatggatgtggagtggccgtctgtgggtttctgttgggttccatttcgtgctcaatttggttcatttgttgttctttacttatccaatcaagttggtgactgcgttataaacgtgtcaaacttgcccagtatatattcagcaatctgcaaaagatgcaaaccttaaaccaaataaagtttgaaacaagactattgattgctgttctggtgcatagggcaatataatgcgcttagttattattaagtttgatttttaaggagtttaagctatggctgtcactaaactggttctggtaagacatggcgaaagcgagtggaacagagagaaccgtttcactggctggactgacgtcgcgttatctgaaaaaggtcgcgccgaagctcaacaagcagggcaactgttgaaagaagaaggttttgtttttgattttgcctacacctccgtgctaaaacgcgctatccatacgctgtggaacattctggatcaggttgatcaacagtggttacctgttgaaaaaagctggaaactaaatgaacgtcattatggcgctctgcaaggtttggacaaagcagaaaccgcagctaaatacggtgatgatcaggttaaactgtggcgtcgtggttttgctatcaccccaccagatttaactaaagatgatgaacgtttcccaggccatgatccgcgttatgcaaatttgaagccagaagagttacccgtgactgaaagcctggcaacaacgattgaacgcgtgatcccttactgggaagaagtgatcaaaccgcgcgttgctcaaggtgagaaagtgattatcgcagcgcacggtaattctttgcgtgctttggttaaatatctggataatatgagcgaagaaaccattcttgagctgaatatcccaacagcagtacctttggtttatgaattcgacgaaaacatgaaaccaatcaaacattactatctgggtaacgctgatgaaatcgcagcaaaagccgcggcggtagcaaaccaaggtaaggcaaaataattcattgccgataaaaaattgctgacaccctattttccagcgaacataaaaaaccggagttgtcgattccggtttttttacatcggaaaaatgttatcagccacgacgcgcttttattgccgacgacaattgacgtaacaaaatttcagtgtcagcccaaccaatgcaagcatcagtaatacttttgccatataccaatggcagaccgctatccgggttctgatttccctcttccaaatgactttctaccatgacaccaataatcgctttctccccagcaataagctgccggctcacatctgaacacacatccatctgctttttaaattgcttagaactattggcatgactgaaatcaatcataattcttgccggtaaacctgctttttccaagttttgcttcacgacagcaacatgttcagaactgtaattcggctctttaccgccacgcaggataatatgacaatcgttgtttccgctggtatttacaatcgcagaatgtccccacttagtgacagaaaggaaactgtgaggggaacccgctgcattaatcgcatcaatggcaacttttatcgcaccatcagtaccatttttaaaaccaaccggacaggaaagaccagaagccaactcacgatggacctgagattccgttgtacgagcgccaattgctccccaactcatcaaatcggctaaatactgtggagaaatcatatccagatattcacccgcagccggtagccccatatcattaatatcccgtaacaactgacgagctaaacgcaaaccatcattaatatcaaaactgtgattcatatgagggtcattaattaaccctttccagccaatagttgtgcgcggtttttcaaaataaactcgcatgacaacttccagatcctctttcagctcttcacgcaattcattcaaccgcccggcatattccattgctgctttaggatcatgaatagaacatggcccaatcaccaccaacagacgctcatcttcacccgtcagaatttgatgaatcgttttacgcgccttacatactgtcaatgcagccttttcagttgctggaaatttttcaagtagtgccacaggaggtaataattcttttatctctttaattcttatatcgtcattctggtaattcataaccctctctcatctaacatctttgtatatccgtcatctttcaagttgcctctttgttggctgcactctctcaccccagtcacatagttacctatgctcccggggattcgctcccttgccgtcgcgatgcatcttgaaatctattgggtatatatttaattaaagcaatctcgtgattttaatctaactgttagaagccaaactgtaaatattctttgtagagaataaataaatcaatgctgatgaactcaagacatagcaagatgatatagtcaaatgtggttaattccattcttatagttgaaatatctttagaaatgaaaattattaaagtaaatacctaaaaatatgccagaaatcgacaaaacaattctctggcatagttagcaaactatttcacatgagataatggcaaagaatggttctccttagctgcctgaatccacaaacgggaaccattaaatgcaatgcccaagagaatcacatactgcaacgacattgccagcacgccttgatggaaatagataacaacgcttatcacattgatgaccatccataccagccagttttcgacatatttacgagtcatcaaaaccattgccacaatagatagcaccgtcattgtcgaatcccagaatgggaaggcatcaggctccaatatcggcatctgaacattaaagccaaatttttgcataatcgtaacggcaatctgagtcagatagccaaagactcgatcaatattaaaagtcataatggcgatcaatagcacagaaatcagactaattattaccgccttattcaaacttaaccaacgtattttaagttcaatctgctgctgatcattaaccctgctccaggcataccaaccataaatatttgccgcaaagaagaataattgcagcaataaactggcataaagttgaatttggaagaaaatcacagcaaataatgtgacattaattagcccaaacaaatagttaattatcttctcctgactggcaaaccaaatacataacaagccagcgatcgtccctaccgcttcaatccacgataaatcatatcctccttttcccagagggatattgactaatatgttgttaatgctgaaaaaattcatctgttatatcctattatctatacccgtcatctttcaagttgcttctttgttggctgcactcactcaccccgctcacatcgttatctctgctcccggagattcgctcccttaccgtcgcgatccatcttgaaatccattgggtatacaacaaaatattaccttcattattcaattttctattttagctgagctgcaaaatcaagcatcctatttaaaggaacaagcgccttttcccgtaactctttttcaaccaatatctcatgttgaccccctccctgctccaacccctgaacgatggcttgcaaaccattcattgccatccacggacaatgagcacaactacggcaactcgccccttctccagccgtaggtgctgcaaataactgcttctcaggacatgcttgctgcattttataaaagatgcctttatccgttgccacaatcagtttctgatgtggcaaagattgcgctgatttgattaattggctggtcgaaccaacagcatcagccagatcaataaccgcttgcggtgattcaggatgaaccaataccgcagcatcgggatgcagaccttttacccttattaaagcctgagttttaaattcatcatgaacaatacaagccccctgccaacacagaatatcggctcctgtttgtttacggacataattccccaagtggcggtcgggtgcccaaattatcttctttccctgactatccagataatcgatcagttcaacagcaatacttgaagtcacaacccaatctgctcgtgctttaacggctgctgatgtatttgcataaaccacaacggtacgatcaggatggtcatcacaaaactgggtgaactctttttcagggcaaccaagatctagcgaacactcagcttccagcgttggcattaaaacacgcttttccgggttgagaattttggcggtttctcccataaaccgcacaccggcaactaataaagtagaggccggatgattattaccaaaacgtgccatttccaatgaatcggcaacacaccctcctgtctcttcagctaaagcttggatctcagggtcggtgtaataatgtgcgaccataacggcatcctgctgttttagaaggcgtttaattttttcacggtaatgttttttttcatccttactgagaaaggcaggtttaggtgggaatggataaatggttgaattaaaatcaatatactggttcattactttgactctctgtttagtatatggttttaaaaagcgataattttggttttcagtccgaaaatttgcccagatttgtttaatatactaaacaaaatgatcaatttatagtaatttatcgcgagatattttatctatgataggatggctaaacagaaaacattattatatttataaaagctgttttattaaagctatttattaaattattttttaattaaaaaataaggaaatcccaagcatgagaatcgttttaccggcttaccctctttttaataacgaattaaaatcaataataaatgcacttttaaaaaaatagttaattgaatttaatcgaagtccattaaccattagcaatgagttaaaaagaaattagaacacaaaaaaatattatccgaataactggtatttaagcgttttctcgccgttatttcatgaacaaagacataaaagataacaaaataaaaaagcggacaaaacagttaatgtggcaagatttaatctctgaaaaaagcttgattatcctaaaaaacataaagggtagcgactgataaaaacgactcaaaactgccagtaataccgcattaataaagataaaaatcgggtatgattaatgttttttaaatataaaacacgatataccatttcgactttgaaagacaaactatctttatctcgaagccggtggttttaacattttacataaaagagtaaatatagcatctaataaggagtcagctttgtgatgtgattcaacatttttgttaacaaacaggttttctaatttgacaacaaatattaattttactataaattaagttacagttgctatattttaagttggcatttagaaactggtgaagtattaaataggttattttaggatcaagattatgcgaaaagaataatgaatctagataaagaagaatttattgtttatggtgaaaatagtaaagtaaaagaatatatcatgcatgacaatgacatattacttacaaaaatagtgaattaaaatgataaaaattactgatttatgctttagttataaaagtagagaaattaaaaaaaatatttttaaaaatatattttcattaaatgaaatcgaaatagttttatttgaaaatataaatattgaaatatttgacgatagcaagattataggattactggggaggaatggcgccggaaaaacaactttaataaagctgatttccggtattttaactccaaattctggaaatattactgtttttggtattgattcaaatggaagacctcttaatcttttatctaatcttggtatcgtttttggcaataagtcaatgctttgggatgagttatctctctatgaaaatattgagtttttttctaagatatataaacgtaattatgataagaatagtgttgaaaatatgatagaaatgttgaacctgaatagcatagcaaaaaaacctgcaaaaacgtgctctttaggtcaatctgtaaaatctaacttattaatacactttcttaataggccaaaattactgatattggatgaaccaacaatcggattagatatagagtcacaaattctattacgaaatattttaaaagattatgctcaaaataatgaaagtaaaatactaattacctcacataatatgatagatattgcggatgtttgcaaagatattatcttcttgaaggatggtgaaatatcaaaaatacatctaaataaaaataattcgaaagaaaagaatgcgctatatctagagaggcttttctgtgataattaaattttcttttattgaaaccattagggctaagaatataatatttggttacttatttataattgtaacattatatgcggttgaactatctttttgggataccatgacaaaatcaaatggttttgttaactataccctatggatttcaagaagcatcgcgacggcaagggagcgaatccccgggagcatagataactatgtgaccggggtgagtgagtgcagccaacaaagaggcaacttgaaagatgacgggtatatacgcatgatgagataatagtttatatattatggtctgttattatatttcaattgacaagtattaccggatttccagaaaatttatcgttccatattgaagatggtagtatagatagactaattataataccaaaatccatactattatattattcagaatatgctttcggacagatattagctagattatttataatgtcaccattaatttcattcataattatataccaaaaagacattcctaatattatatatctatttatttcgttatgtatagggttatttatcaatttgtacttaacaatgatattgtcatgtatggcattcaaatttagaggctcgtactcttttatcattattaaggatactttgtcatgggtcctttcaggtgcgttgataccattagatgtgtttggtgactctttaaaatcaatatttaattatattccgtttcaatatattacctatattccagttaaatttgcaacaaattcaatatctatttattttatatttaatggattcttagtcatgatgtgtttaatgatgatttttaattttatttggaattatatgttaaaatacaatcaaggatataatggtaatgcttagagttatatttattggttttaaaagtggattatcagaagcaaaaagaagcccattaaatttttggttatccgcttttgttaattttagttactatatagcacaagcttttttttggtatgctattttaaattcacaatcttcaagttatattttatctgatgattttgttattatatttttcactacggtatgtttagtcgataatttttatctttttttatttggtaaaggaagcttcttgctagttaaaaaagtcaagtcattaaagttagaacctcatttaacgttacctataaatactcaatttttatatgtcactacaaatattgtatttgagcattttttattgtcattcctatctttagtattattttttactgtacatatttaccttggtactaatattttgttggtttttttacatttgataatggcattagaaggagtcttaatacttacttcaattacatggataataagaacaacaatattttggacagcttcattagttagtattaagaactcaaatccttgttttaaagtattggtgagacctgaacaatcttttcatggtgtagttcgttttattttaatgttcatacttccgtgtctatttataactggtgttccagcttcagtagcaagtggaataatgagtatgaaatggttttttattcaaactctggtcacattgattttaatttttatagcgaaattggtttttgatattggtgtcaaaaggtattcgaaatatataacgtgaggaaacgtaatgaaattggaaattatttcagtaagctatagttcacattctaattcaagtaaagttggtaattccttagatttattttaaataaccaaaaaaataaagccggactaaccggctttattcttgctgcacgctgcttccgccactaaaattatgccgccctgacaatgtagttaaatgcgacattgcgtggtcgaaatcgtaagaaattaaccccagtggttgttggtgatgttacgttgtattttaaatatcctgccgcactacttgcaataccgtcgtagtttactatctgttgccctccccctcttgggaaatgaccaaggtattccgccaatgaagtgctttcttgccaagtcaatagcgccctccccagatcaaccccacgcccatcatcccatccccggataaactcacctcttaaatcaggtaatctaccactaggataagcttcagctaattgcgggtactgtaatgaattaaaagctgaaccattacaaataaaataaccggtagggggattaggcaacggccacggtataggtgaacccacaggtatagtaatatctgcacgtaatgcatttattacttcctgaacaagcttttgtgtcactgccaatgtgtcgctattacccatcacatttgtcaactggacaacacctttttgtgttaacgaagcactgggaatatctgttgtaattttttgttctaacgctttattcaattgatctgtgagtttagctatatttccatcatccagaacatcattgccagattgtgccgcaataaaatcagccaccacagatgataccgttgatacttgacgtaataccttatttaacacgtgcgtaggaacattatctgggggaaagccagtctgcaaaccctggttttcttcatatttttcttgactgaccacattcgcattatcactaatagaaaaagccttaaaatcatttttaggactcatacatacctcttgaatcaaataatattctttcataagaaacatattaaactattgtaaaaacgatttatcgtaatttacataaataacagtctagttcagaaaaatcacaatggagcgttcttattacttatgaggttaatcatttttatataattggcagcaataaatatctcaacattttttaatcgaaaatatatcccctcaaaatttatatttaatctctgaaattattttttacattccttcctgtaacttcttctgttttaaattcaaaatagaatcttctggcatttagacacgaatatctaagcgacagtgttctggaatgtcacacaactttctctattttaagaataaaaaaataaagccggactaaccgactttattcttactgcaagctgctccagccactagaattatgccgcctttacgatgtagttaaatgccacgttacggggtctattttcgttagcggttgggacttgtcttgatgcatcaatgtcaaaatatgtaagatcagtactaccgccgctatttgctgaacgtgtatctgccgtagcatatcgcgacgatgccataaccccactcacaacaggcgtctggggagcaccgcccatctgagcatgtatcatttgagttgtccctgtaatatttctaattgcatctccctgccaagacaaaagcccacgaccactatcaacaccacgattatcatcccatccgcggataaattctcctcttaaatcaggtaatctaccgctaggataagcctccgccaacttcggatactgtgatttattaaaaggtgagccattacaaataaaataaccgaaaggtggatagagtaacggccagggaataggagaaccaacaggaatttcaccgactgttttaatccggttatctatctcttcgcgggtataagtatgctcacgtaatgagtttatttcttgctgaacaagcttttgcgtcactgccaatgtatcactattgccaatcacatttgtaagctgaacaacacctttttgtgttaatgaagcattgggcatatctgttgtaattttttgtgctatcgctttatttaattgagcggtgagtttagctacatttccatcatccagaatatcattgccagattgtgtcgcgataaaatcagcgacgacagatgatatagttgatgactgacgtaataccttatttaacaaatgagtgggaacattatccggagaaaatcccacctgcaaacccaagttttgttcatattttgcttgactaatgacatttgcattactactaatagaaaaagccttaaaatcattcttgtgactcatatattttccttaaattaaataatgttatttaataatcaacatcttgaattattgtaaaaataatcccctgtaattcaggctaatcaaagtctagttcaagaaaaaaataacactgtgttcttattacttataagcttaaccgtttttgtatcattggcagcaataagtagttcaatattttggagtcgctttcggctttgcaagaaatggaaattaagaaaatatctcgatggtgtgtcgatatgtacatttgttgcgagtacatattgaaaccccatcgatgctattatgaaattttaccgcaaaaatatggcacattaccctttttctgttttcagaataaaaaaataaagccggttacccggctttatttccttatctattccgttgcttgatagaataggtttatggaatgactataacactaggatctgttaacgaacattcgatgtttgatactagggtgacagcaataatatttactgtcgagtttcttgatttatcaaacaaagaaacctttatcacctcagtagagagtttttccccttccactccatcatttaacgtaattatcctaccattgtgtttcagaggaaattcatttaacagaatgctagcactctttgaaatatcaacattatcagacttaataatacctttttgttcagctttctgtattacttgctgaacattccaaccgttaatatctgcacaatcatcagatcttgttcccgccacagcgttagcagtaaaaagcatcgcagttaatatcaatattagtcttttcattcgacaaccaaatccatatcgtgcgagagcaatatctcacgtcgtatatctctattaagaattatacaaccttctgatgaatgttcaggatcttttctgctagcaccgtgaattctaaaagcactacggccatgcatatcattataactacatgggtcaaggataatagtcatggggccttttgagctattttcaccggttattttataataacctctgggtataggacctaagttttttataccttctgatgcaggattattcttatgtataccctgaccactccaaccgtggccaattagcttcgtatcgtgataaatttcaccactgtattgttgataaatccacgtcatagtgcatgcctctacttgaattattaatactaagtttcatttctacaaattaaataaaacccatatagctcatcaattagacaataacatatctgaatagttctcatacattactaaaataactggatttattctccatattttcctgtaactttttttgcttccagttccaaactgaatcttctgacatatggacacgaatatctggtattaaagattttcacttccgtgttctacggcatatgtaggcacgctggttgatataatccaaaatcgctttcggcattaggcattaggcattaggcattacacaagaatacggcacattaccctttttctgttttcagaaaaaaaataaagccagactaaccggctttattcttacttcaatctgctccggccactagaattatgctgcccttacaacgtagttaaatgcaatgttacgagggcgagtttcatttgcagtacgtgcgacacgtgatgaatcgaaactaactgcgtacgatgttccattttgtgtcacatgagatattgttctcaagtcaccctctagaaaaactccggatgtggaatcatgtggacgcgtcatcaaaccaatgccgttaccagcttctaaaaaacctgtcattcgctgcatcgcatccccctgccacgacagcattgtgcgtcccatgtccacaccgcgtccatcatcccaaccacgaataaattcgccccttaaatcaggtagcctaccgtcaggataagcttctgctaactttgggtactgtaatttattaaaagctgagccgttgcaagtgagataaccaacaggtggatagggcaacggccagggaataggagaaccaacaggaatttcaccgactgttttaatccggttatctatctcttcgcgggtataagtatgctcacgtaatgagtttatttcttgctgaacaagcttttgcgtcactgccaatgtatcactattgccaatcacatttgtaagctgaacaacacctttttgtgttaatgaagcattgggcatatctgttgtaattttttgtgctatcgctttatttaattgagcggtgagtttagctacatttccatcatccagaatatcattgccagattgtgtcgcgataaaatcagcgacgacagatgatatggttgatgactgacgtaataccttatttaacaagtgagtggtaacattacccgatggaaatccagtctgcaaactttggttttcttcatatttttcttgactaaccacatttgcattatcactaatagaaaaagctttaaaatcattcttatgactcatgtactttctccttaaattaaataatattattttataatcaatatattgaattattttaaaaataactctcctgcaattcactccaattaaagtctagttcagaaaaataatatagttcaatattttggaatcgaaaatataccttaaaaatttacatttaacatctggaaattatttttctcttattctttctatttcatcccgtaactttttctgttttaaatttcaaactgaatcttctggcatttagacaaaaacatctaagcggtaatgctcaggaatatcataggattccctatctttgtagaaaacacgcgcattgttattatcgatacccttaagttgccagttctgaaaacgtgtcgataaatgcaagtgctgagataccatcatacacacctcatcccatacctactctatagcttgtgatattacagttgatatatttcacccataaaacaactacagttaagcgatataatacttgccacagtcccatgacgggattaaggtgactgtgatgaaaataatatccattgcatcatcgaaaacgttctgagaaaaacacccagatgcaaaacaaccactaaaggcttagtttgacgaggcaaaaaatgcctcatggaaccgactacttatcaaaaaatccacacaattttgttttatatactaaacaaagtaaccaatttataacaatttgtcgcggagtattttacctgttataagttattacattacctgctaatttatgagattaggctcactcatcaatcattactaaagttaaataggaacttcatataatggaagacccggtaatccttctggaaaaaatcctgacttttgcccataacgatccccgtattgatacagttatccaaacaggttcccgtgccagaaatgcacgtgtagataaattctcagatctagatatagaactgattggttcaggaacagatgaattaataggcaacgatttatggtttaagcagttgggtgacgttatggttgcattgcatctggctaatgaaaaagaggatgaaccagattggccaacttgtctggtcgtttttaacggcggtcgtaaggtggatttcacactggcaagtgttaaacgcctgaaagatatgaaacaaagaggcttggatgaactttatcaacgcggctataaggtcctccttgataagacgggccttacaaacggacttcctgaaattactcaccaattgactaaatcgtatattccatcatcaacagagtttaatgaaaacctgcgcgagttctggttcgaggcaacacaagtacctgtttatatcactcgtggtgatttatggcatgcaagaatgagggataatgagatgaaagacttattgctggcaatgatggagtggtacgtctcgataaaaagtgatggaaagacggatgtctggtacaacggccatcatttgcatgaatggctgcctgagaagttcagcaaacatattcaagggatttttagcagttatggcaaagaagaagcgatacgagcattgctggaaaccacagagctttattcggagatttctgctgaagtggcagaaatgaaggggtttgagttcgatagtgagctacccagtaaagtcaggaagcatattatgcaagtttgttatggttaaataatctcgaacaccacaaaaaacctgtaagtgtaatcaaaagtcaaacgaaacagttcaatgaggaaactagaaaaaaatgaaaatgcaaaaggactcttctcatacagttacgatcaaggaagtaattattcagcagaacgatgaagagaatatggaacaaagcgacccggtaccactcgtcgaaatgtcagtcagtctcgcttcgctcggctcgaacctgcgaccaattgattaaaagtcaactgcgctaccgactgagctaacgatccatctgggaaattggttttgaatgaagctctaagatggtgggtcgtgcaggatgactcggcctacggcctcgcccttcgggccagcgcttacgcgctgttgtctcgcttcgctcggctcgaacctgcgaccaattgattaaaagtcaactgcgctaccgactgagctaacgacccatctgggaaattggttttgaatgaaactctaagatggtgggtcgtgcaggatgactcggcctacggcctcgcccttcgggccagcgcttacgcgctgttgtctcgcttcgctcggctcgaacctgcgaccaattgattaaaagtcaactgcgctaccgactgagctaacgacccatctgggaaattggttttgaatgaaactctaagatggtgggtcgtgcaggatgactcggcctacggcctcgcccttcgggccagcgcttacgcgctgttgtctcgcttcgctcggctcgaacctgcgaccaattgattaaaagtcaactgcgctaccgactgagctaacgacccatctgggaaattggttttgaatgaaactctaagatggtgggtcgtgcaggatgactcggcctacggcctcgcccttcgggccagcgcttacgcgctgttgtctcgcttcgctcggctcgaacctgcgaccaattgattaaaagtcaactactctaccgactgagctaacgacctatctgggaaattggttttgaatgaagctctaagatggtgggtcgtgcaggatgactcggcctacggcctcgcccttcgggccagcgcttacgcgctgttgtctcgcttcgctcggctcgaacctgcgaccaattgattaaaagtcaactgctctaccgactgagctaacgacctatctgggaaattggttttgaatgaagctctaagatggtgggtcgtgcaggatgactcggcctacggcctcgcccttcgggccagcgcttacgcgctgttgtctcgcttcgctcggctcgaacctgcgaccaattgattaaaagtcaactgcgctaccgactgagctaacgacccatctgggaaattggttttgaatgaaactctaagatggtgggtcgtgcaggattcgaacctgcgaccaattgattaaaagtcaactgctctaccgactgagctaacgacccatctgggaaattggttttgaatgaagctttaagatggtgggtcgtgcaggattcgaacctgcgaccaattgattaaaagtcaactgctctaccgactgagctaacgacccatcttgtgacttctctcggcaacggcggcatatattactgatttttctgcactacgcaataattattttttcaaattacgtttaaatgcttactaagcactcaacaaaccccgaaaatgtattattacacccttccggggccaataattacagcgtagaaagctttttctctgccagtttagctgcgttcgaaccaggatattgtttcatgacctgttgataaaccgatctcgctttatctttctggcccttgtcttgcatgattaaaccaactttataaagcgattcaccactcttctgcgacttagggtactcttttactaccgtagcaaagtaatacgcagcttcgtcttttttacccttgttgtaattaagctgtcctaaccaataattagcattaggcatgtaactcgattttgggtaactcttcacgaaactctgaaaggctataatcgctttatcatattctttggtattcactgccaaatgaacagcagcgtcataatcacccttctcgctgcctgtactgacagatgatgatgcctgattgccactgttttttgtattacttgccgttgaagaagctgtatttgcagcaggtttactcccctcagaactagtagcaccttccagttgctgataaatatccttctgccgctctataatctgattgagctgatactgattctcctgaatctgccctcgaagcatgtcaatatcacgttgagaatcagcaagttgctgctggagctgagttaatagctgactgtgagcattggaaatacgctctaattgggtaaggcgttcatcggtagaacccgagccgacattactgattggcgcttgggcaatagcggcccagggaaccgctacgccaaccaataacgacagacccaaaaaatgatgtctgaagttactgttcatgaactactcttagtatgccagtactgcgcgacggtttttagcataggcggcttcgtcgtgacccagtacagcgggtttctctttaccgtaagagacgatagagatttgctcaccggaaacacctttgccttgcaggtacattttcactgcattagcacggcgttcacctaatgcgatgttgtactcaggagtaccacgttcgtcagcatgaccttctacaacaactttataagatgggttgctgcgcaggaatgccgcgtgagcgtctagcagctgagtaaaatctgagttgatgtcgtatttgtcaaaaccgaaatatacgatgttgttgttttgtagctcttgcatttgctgacgagctaattcctctgctgacagacccgcattagtttcattaacagtgcccacaccagtctgatcgttatcagcattcttgttagaactacacgctgctacggccataactggtaaagctaacatcagcccttttagcactttgttcagttgcatctctttgatccttttaaaatttgccatacatattattatgcatcacagatacggcgaccaggcaggaaattttacctgtccatcggttgccggaagacgcgctttgaaacgcccgtcagtcgaaactagctgcaatacagtccccaacccttgggtggagctataaatcaccatagtgccgttaggtgcgatactcggcgtttcatccaggaacgtatccgtcaaaatttgaacggctcccgttgccagatcttgtttagctatgtgctgcttaccactctctgagctgaccatcatcacaaaattaccatcagcacttacatcagcatcctggttttgtgtgccttcccaagtgaggcgttgcggagcaccgccatttatatcggttttgtataactgtggacgaccaccctgatcagaggtataaaccaaagtctggttatccggcatccaactcggctcagtattgttactgcggccatctgtaatctgacggatctgagctgaacccaaatccatcacgtaaagattcaaactacccgatttagacaacgcaaatgccaatttactgccatcaggggaaaatgcaggtgcaccgttatgacgtgggaaggaagcaacctggcgtacttcaccactcgccaaggtttgaataaccaaggcagaacgaccactttcaaatgtcacataagccagtttggcaccatcaggagaccaagccggtgacatcaacggttccggcgaacggtgaacagtgaactggttgtaaccatcgtaatcagatacacgcagttcatacggatatttaccgccattagtctttacaatgtaagccagacgagtacggaatgcgcctttgatgcccgtcagtttttcaaatacttgatcactggctgtatgtgcagcataacgtaaccactgtttggtcactttaaattgatcctgagcaagcaccgtacccggagcactcgcagtatcaaccaattgataagagattaaaaaaccaccatccgcacttggttggatctgaccaacaacaacagcgtcaatccccaacgccgaccatgcagcaggtgtcacctcagatgtcgtcgttggttgctgtggcatgcggctgatatcaatagggttaaatttaccgctgttgcgaagatcggccccaacgatcgcccctatctcttccggtgcattacccgcaccagtccatttaaagggcacaacgccaataggacgtgcagaatcaacaccttgggtgatctcaattcgaacttctgcgtgagcaaccgtgacccacaacattaaaatgcttagtactactttaaaagcctgcctcattaatctctcccttatcacgatggaatggtcgcaataattcgcagaatattaacaaacgtcaacaaacaaaaccagatatacccgttatctttcaagttgcccctttattagctgcactcactcaccccggtcacatagtttgctattctcctggggattctctcccttgccgtcgcgatgcattttgaaatccatagggtataaataaccactttattgagggttgaaatcaagcggcgcgtttttaaacacttcataaacctccttgcttggtggtttcggaattttcgcttgtttagccgccgctaccgccgcttggcacaacgcctggtctcctccctctgacttgacatcaattaataagccatcaggagcaagtttaatccgtaatgtacaggtacgcccacgatacatgcttggatcgtaaaacttattctgtatcgctatctggatctgccccagatagttattaatgtcggcatttgaagcgccacttttcttgccgccacctttaccggcagcagaagctcctccttgctgtttcggtgcattggaagttaagccacccagtaagtcatcaacttcactttcctgtttagcggcttgcgcagcagcttttttcttagcgtcagcttcggccttggctttagcctttgcatctgcctcagttttggctttagcatccgcttcagccttggcttttgctttagcctcagcgtctgctttggctttcgcttcttccgcggctttttgtttagcagccacggcttcagcttctttcttagcttccgcttcggctttcttctgtgcctcagcctgctctctaatcagtttttctttttcagctttagcttttgccgccgcttcttctgcctgtttttgctcttcacgggctttgtttgccgcttctacagcttgctttttctgttcttccgcagcctgttgcgctttaattcgttcttcttctaccgcttttaaacgttcctgctcttcagcctgtttttcccttaattcagcggcctgctgttcggctttcttgtttcgtaactgctctgcacgcttagcatcagcctgctgttgttgctgttgattgtactgctgtactaccgcattcggatcgaccataacagcatcaataacagaaccatcctgaccaccgccacccatttcagtttttcgtgtcagggaaccccaaataagtaacccgatcaaaataatatgcaacacaaccgaaacgataacagcgcgatttaatttattgttttgcccgtttgtctttcccacgctcgatatccaagatcttcaaataacagcaactgtcggccaaactcagataggctgagtcattaaaccaacggatttcacacctgcctgatgcagcatattgagtgccttaataatctcatcgtaaggcacttccttcgaaccaccaatcaagaaaacggtttttggattcttttctatttgtgcccgcgcttcaacaataatctgcggctcaggcaataattccaaccgttcatggttaactatcatggtgtactgaccaacaccagaaacctccacgattaccggtggattatcggagttggaaaccgttttagaatctaccgcatccggcagatcaacttctacgctttgagtgataatcggtgctgttgccataaaaatcagcaacagaaccagcaatacgtccagtaagggaacgatattgatttcggatttcagctcacgcttgcgactacgagtgcgtgccatagcctctccccttactatttgttctctgctttattttcagccgcgaaagcttgacgatgcaaaatagccaaaaactcttccataaagttatcgtaattttgctccagcttattaacacgctgattcagacggttgtatgccataacggctggaatcgccgcaaacagaccaatcgccgttgcaatcaacgcttctgcaatacccggcgctaccatttggagcgtggcctgttttaccgcacctaacgcgataaatgcatgcatgatcccccaaaccgtaccaaatagaccgatatacgggctaattgagccaactgtccccaagaatggaatatggctttccagcgattccaattcacgattcattgagatacgcattgcacgtgaagcccctgttattaccgcttctggcgcatgattatttgcatgatgcagacgggcaaattctttgaacccagaataaaaaatttgttctgttccacctaaagaatctcgacgcgactgactttccttatataagcgtgataattcaatacccgaccagaatttatcttcaaacgcctccgattctcgggttgctgcattgagaattttggtcctttgaataatgatcgcccatgaagcaacggaaaagcagatcaaaataagcatgatcagttgcaccaaaaggcccgctttcaggaataaatctagaatgttcatgtcagtcactgcttaaactccgcgacaatagactttggaagcgcaatcggcttcatttgagatgtattcacgcaggcgactaaaacttctgcgctgttaatcattgctccattaccatcaacaatgcgttgaataaatgtcaaagatgctcgacgaatatccgtaatttcactctgcacctccaacatatcatcaagccgggccggggctcggtaatcaaccaccatacgccgtacaacaaatgcaatttgttcatcaagtaaacgctgttgatgaattccatgctgacgtaacatctcagtacgtgctctttcataaaagacgacataacggccgttataaactatcccgcctacatctgtatcttcataataaatacgaatgggccaccggaacaacgtattactcactttcaatcctacataaggcgaattaacgttgccactatactcaagacaatgcggctttggaataatgtgcaaataaaaaatttatgggttagatgccccaataacatacagaattaacttataaagaaatgacacagcccccaaatcaaaatcaagcatgccggcaagggagagaaaaagatacgccagacgatatttcttggctgaaaacccatcccgaaagtcacacctgtacatacagaccatattagaaaatactttgccatatctgtaatgaactggtgttagccgcaaaacgagcagggtcccagaatacataagcaacgaatattaatgccacaataaggataaagcccgcacaggggctttatccattagtatctagtatccatgccgatagtatttatctatcaacaagatttctcgctatttttcgcgactttttcttcttcattatgctcaagagctaaggctgcgatgatagcgaaactacaagccaagagcgttccgagaatccaagcaaaataccacatgctttatgttccttagtacagtgaatgtttgttatcttcgataaaacttttatccaaacgcccgaacattttgtagtaacaccaaatggtatatcccagaatgattgggacaaaaatcaatgcaactacaaacataacacgcagcgtcatcaggcttgaagtcgcatcccacatcgtcaaactgacattaggatcagtgattgaaggcatcacaaatgggaacatcgttacaccgcaggccagaatgatgccagcaattgtcagtgaagagaacaggaatgcccatccagctttattcatacgcgtcatcagcatcgtcagcaaaggcgaagccacacccaatgccggtagtacccacaaccacggatagttgttaaagttggtcaaccaagcacccgcctgatgagcgacttctttatgtaatggattagactgagccaccgtatccaagccgccagtcacaatataaccatcaataccataaatcagccatacacctgccaacaggaaagccaccattgtcaccagcgcacagagataagttgccgcacgagaacgcaggcgcagctcacccgtagtacgcatttgcaaataagttgccccctgagtcacaatcatcatcaagctgataattcccgccaacaaaccatatggattgagcaatccgaagaaggaaccggtatagaacagacggagttgggaatcgacgttaaacggcaccccctgtaatagattaccgaatgccacaccgataactaatggtggaacaaagctaccgacaaatattccccaatcccacatgttacgccacttgcggttttccaatttggagcggtaatcaaaaccaaccggacggaagaacaacgcagataacaccaagatcatagcaacatagaagccagagaacgccgcagcatagaccatcggccatgcggcgaacagcgctccaccggcggtaatcagccaaacctgattaccatcccaatgcggtgccactgagttaatcatgatgcgacgctcagtatcgtttttgccgatgatacgtaacaggataccgactcccatatcaaaaccatcagttaccgcgaaaccgattagcaatacaccaatcagtagccaccatataaatcgtagtacttcataatcaaacataagtggactcctgtttactgagcttcaggtgctgaagttgttttctgttcaaaatggtaacgccccgtttttaggctacttgggccaaggcgagcaaatttgaacatcagaaacatttccgcaatcaggaataaggtataaaggccacaaatcagcgccatagagaacaagatatcgctggctgctaaattggaactcgccaccgcagttggcagaacttcaccaattgcccacggttgacgaccatattccgccacaaaccagcctgattcgatggcaatccacggcaatggaatactgtacagtgctgcgcgtagcaaccatttttgtttaccaatgcggccacggataacgctccaaaacgccagaccgatcaacagtaacatcaggaaacctgctgcaaccatgatacggaatgcaaaatagagcggtgcaacccgaggaatagaatcttttgcggctgctttgatctgttcttcactggcatcagtcactttgctggtatagcgtttcagcaacatgccataacccagatcttgtttattttcattgaatgctgtacgaaccgttgggtcggtgttacctgcacgcaattcttccaacaggtgataagcctttataccattacgaatccgctgctcatgcaggtccatcaaatcacgcagaccaatgaccggagtatcaacagaacgggtagcaatcagccccataagataagggatctgaatggcatatttgttttccattttatcctgatctgggatacctatcagtgtaaaagcggccggcggtggctgggtttcccattcagcttcgatggcggccagcttagttttttgtacgtcgcccatttcgtaaccagattcatcacccagcacaataacagacagcacagccgcgataccaaaacttgaagcaatcgcaaatgaacgcttagcaaatggaatatcacggcctttaagcaggtagtaagagctgacaccgagaacaaagatcgctcctgtcacataacccgcggcaacggtatgcacaaatttcacctgagcaactgggttcagtaccagttcagcaaaacttaccatctccatacgcatggtttcaaagttgaaatcagaagcaattgggttttgcatccaaccgttagcaaccagaatccaaagtgcggagaagttagatcctaatgcaaccaaccaagttaccgccagatgttgtgtcttactgaggcgatcccaaccgaagaagaacaagcctacgaatgtagactccaggaagaacgccatcagcccttcaatcgccaaaggtgcgccaaaaatgtcaccgacgtagtgagaaaagtatgaccagttagtcccaaactggaactccatagtcaaccctgttgcaacccccagagcaaagttaataccaaacaacttgccccagaattttgtcatatctttataaatttgtttaccggagagcacatataccgtttccatgatcgccagcaaaaacgccatgccgagcgttagcggaacgaatagaaagtgatacattgcagttaaggcaaactgtaatcgtgacagttcgacaatatcaaacatcttgactccttgctcctagcaggaagacaccgacttgcggcaacctgacttcatataagcccttttctcaaatctcaaagtactcatgcggaagcctcgtaactaccagcaataaatgcctttaaaatataccgttatctttcaagttgcctctttgttggctgcactcactcaccccagtcacatagttacctatgctcccggggattcgctcccttgccgtcgcgatgcatcttgaaatctattgggtataacaactcattactaagtaaattaaaaaccaattagactaatagtatagtacgcttatattcccatacaataaataggttttacgtgattcagattagaattctgaatataggtcaagaattgcaaccgctgtttaataagaactaatttgattagagtcaatttaagcaaatgaaagcaataatactatagtaataatttgattttatttatctttttctggttagtgttaattatcttgtctattatttcattttggttgacatattgttaattatttgtttatttagataaatattgatttctatattgctgtgaaatgacttttaaaattaactttttattttgatccttaagaaaatattattattaactttgcattaacagtgagatcaccaccatttggctgtcattcagatagcataatgacacgcagctcaagaactaaacttccctcttacgacagatctcttcaaactgagtgaaatgacttagtatcttaagttacacagcccaacaataattgtgtaaaaatattttacacaacagaaaaactgcgcgtaccagcaagtaatgaccaatatcgcattattacattcacatggtactacaaagcagaaacattctgatatttttaaagatatcgagcttatgaaaaagctaaaagttgagatcagaaaactggttgaattagaaaactcgcctacagagccagcaaattattttggccttcccagaatagcattctccaaagattctaaattagtttcagctcaagtttttagttccatatattttcctcctcttactactttaagcaacgataccattaaaactgagactaaacagacatcgatcctctccatttttagcacagacaaaaatgggaagatcaaaaaaacactcatacgcacaaatggaaatgcaagagacacagaaatacgagatttttcaataagcactggggaatataatcttgctgacttgaagaaacttggatttattcaatctgttgctgctttccaagggaaaaaaacgggaaacctctcactactggcccagtattagttaagtcaaatacactgacaaaccttgaaaatccttttcaatattttcagcctcacacaatgaagaaccatgcaccaactcatgtaaagaacccaaaaacgcaatcggtaatcgtttgcttgaatagagcaaatcctgaaccaagaactcctagtcaatgcgattatggtccaacatcacccggtaatccaacaatcaagttagaaataataggtgatattatattcaataaccctatagcggttgatgaaaaaggaaaacctacaacgtttcagggaatcaaaccagaggcaaatctgacactaattggtcttaatactggaggagcatgtgaagtaagaggaatagatgaaggtatattttggaaacatacaaaagtcaataatgatcctgccaaaggtaataatacaaatttatcatgggatttttctaaaaatacaggttacgctgatttttgaccaatatactggaaaaataacgaaagctatttactagacttacaggctactgttataacaatgcaagatgataacgcatttccggttatattttcttataccaataaccctttcgtattaccacgatggagatcactgccttgaaaaacgccgttattgggtgatctccatggacgaaaatacgcagtcgtcgttcaagcgctatgctagcagttctttaacgaatttaaatgatttatgaaaatcggctttaggatctttaatttcacccgacccatcctgattgagctctaaagaccagtgatatgggtaacgctgtttcaattgctgtagttcgtcataagttaataccgtatagccgtgttgtttcatgtaagaagcaaacacctcaagttttggttcggctatagtagtaataactgctcggtcgcaaagatatttagcatagtgctgaccaatttctttattttctgtctcagctgcttgtaaagccgcctctacaacgtgaagcggtgcctgctgcgacacaattgcactacaagtttcagataagtcattaatagtaggattattcataatgcttttacctttcctttttaattttcaatggcttgtgctatttgttttgcgacctgatgtgctctaggatcggactgagtacgcaagccttctataattgctaagcggtcatcaatgttacgttgctgcatcaactgcctttttcccagcagattgtgaatagtcagctcgatcccaacgacatgctgttttaagccgtctataaaatctttcggtgcttctgcgacttgccaaggatccggtaatcctgcttcaaaacaattaacggattgctcaaaatgcgcctttatccaactgccatcatcaataaacttgatggaacacatggcatgaactgccgtgtaagcccaactaggttgaactcgaccattgatatgtcgtctaggtaaccaactaggtgaaatataagcgtctggtccttggaaaataaccatcacttcattagtttcaaccacgcttttgtgcaaaggatttccgcgtgcaatgtgtgttttcagcacgcctagctctaaaccatgcctatctaaagtaaaaggcagatgatcagcactcaatccataactgccatagacggtcaaagtccccagagggttttgctctatcaagtcatgcaaaacagagattcgattttcttcaaatactttttgtatatacattgcttgaatcttatgagttcaaagaagacaaaggctcactataaccttgttcttcaagctcccgttgtgcacgatcgtttttcttcaagtctgctaatcccataccattgagaacaccaggagacttagtaaatttaatattctcgtagctgaccacttcgatatgattgccccaaggatccagaaaaccaaaaaatcggccaggcaaaggttcaatatcgaattgctttaatgcctcacgaaccttttctttatcatcaacaacgaacccaaaatgaccaggtttgtgagcttgttctccttggctgcaagtaaaggcaacaaactgatcacccagttcaatcgatccctcagtctctgataacagcccgggtttaatgcgcataagcgcactataaaatgcgactgcttcattaatgttaccaacttcaatagacacatggttgatccctacggctctggccttctctgtcatgattccctcttcatcaaatttttttgaagttcaatttgtctacaacgatatcaagtgccgaaataaatttttcgcaatgttcaagctgtgaaatggttactctcagccaaccttttaaattactctgttcaaacggacgtctgattaaaataccctgctcttgaaacaattgctctatctcttttgaatcgtatccggcaaactgtaccaacatgaaattaccgtgagtatctttgaaagtctgtcttctttcggtcaaagcttctctcatataggcttttgtctgcctcatcttctcctgaaaacgttcaagcacttcaggatgatctagctgccattccgcagcccatgccgataacgcactaatctcatatagcggtctgacatttgaaatatggccgattaactctgtccctccgatcaaaaagccgactcttgctcctgccaatccatgagctttagaaagggtttgtgccaaaataacgttcggaaatttctgcaagatatccaggtttgcgctttgttttccttctacatatagataggcttcatcaatcagcagcaacacacccttgctataaagcgcttcagccaagccatgcatttgggaataagataaacgcgtgccgacaaaaccactcggatcttctacaatcactaatttggtattttctttgactgcatcgataatagccgctacatcaggtttccaatcttcggtgaccggtgttgacgagattgataccccagcatactttgcgtagttttcaaacataaagtagcaagggttatgtaaaaccacatgatctccctctcttaagcatgcatcaaataatgcttttatcgctaggtctgaacccgagccgaggtagatgttgcgctcttcaacgccaaccagtttggctatttttttatataagttatttagcaccggataattacacaaatgctctggttttaatgaggctcgaaacgcttcaaaaagatcttcatccattggatggtgattctcatttttatctagcatcaagtaattggggcgttcttccagatagctccataagctttcccttttattttcaactacatgctctttgattactgcttgtatattgaacatttattttttccctaacttttaagagttagccatttgtccatctaagatgaggatttgctttcaatggctagtgattgttttatgatgattgcaacaaataaaatctggccaatagtaattacagctgcggttgcaattgcgtattggaaacctaattcatgtgcgtaagagaccaccatggcgacaatcccgatatgcactgaggatacgatatacttaatactacttagcctacctatcatgtgagatggcagctgtttatgtagcagtgtgcgccagtaaatacctgagtaactttgaaacaagccgatactcacaatcgcgagcggcatcaaatagaccgcctgttctgtgaaacataaacctagatagattagaaaagcgacctgaatagcgataacatcgcttagagaagtacttttgttccttatttgcttcgcaataacagcgccaccaacaaacgctccaatagcgaatgaggcatctaatccggcaagccagtatgtgctgccgtcaaatgcctgactgacgacggaaaccagcataatgttgaatatggctacagtaacgaaatcaaaattacttagaacaaaatagcgcatgtagggtttactagctttaaacaactgccacaggttttctggatcttcacgtttatctatatctgaaggagactcagctaacgacaaattggctgttgctcgccagtaaaaaaagctcgcggcactatatagacagacgacaaacatcaaaattgctataaagtcaaactcatctagcaaccaggcagataaggccataccaatcaactgaccgccctgaaatgcggaagtcagtgtaccgttatctttttctaagcgatcatgttgagaaagaagtggtgtaacactgaataaggccatttttgaaattggcccaagaaaactcaaaaacaccgatattagcaataaaatcgacacggacatgcccaattgagtcaatgccaatacacctgccaaacaaaagacaacatgacaaacggctgaaccaataagcaccgttttaataccttggttatcaaccgacttgccaaccaatattggtaaaatggttgagatcaagatttcagctatgaagattaagctaatttgccatatttgacccgtttcatcatacataaatttggcaaagctcagtagcaatatagctttacctatattgatgaacaactctgcaattgctaacgacttcattcatgtttcccttcagttagatacagtactaagtacttggatgaacttatggttacactactcacctacaacaaattcaagtttctgaatggcttcctctgcaatacttagcgcctgttcagaactgtcgcacaacaccaacaccgaggctgagcggtcgaagctgtttactatttggggcagcacttcacctgcctgatgagtgatagatacatcttcaacaccactccaatttttgatttcttcctcgccgttcactcgaataacctttttcccaggatgatcgttgagtttaaatttgatacacgcatgtttaccgtttagttttggtgttaattcgtcttcaccgataggcaaacccaaactttgcagagcttgtagacgatacatatctattcctgtcgtcatctgtaccaggtcaaaaattctgtctccgcctactcgagtgtgtgtttctattagctctatcttttcacccaacataatttcgctgtgcgtaatacccgacacgacccctagagcaggtagcaccttggcaatgaatgcagcaattttctcgtgctcatcgctagataaacgggcaggcaccaaatgccctgtctcgataaagctttgcgcatctttgaatttttcagtgattgcaaaaatatggcatttaccttcttgcatgaatgcttcaacactgaattcgcgaccttcgacaaactgttccaccagcacagggtaaacgttgtctaagttagcggtttcaagctctttactttctagcgatcgaacattttcactgcctgtaccagcaactggtttaacgataactttatttacttgtggataaatcttgaaaaaatcatgtaaatcttgctcattctccgctatcgccgattgcacttctgtcaggtttttttcgcgtaaaatcctgcgacttaattgtttatctctcgtgttgactatagcccccattgacaaactaaaaggtagctctagagcatttgcaatagtcaatgcatcaagctgggctccatcgtgaaaagacacaactgaatcgattttttgtagttgatcaattgaacgcgctaaactgattaactgaattgcagactcgttgctgtacattaatattcgctcgcaacgattgtgatcttcagtcgtatgcgtaaaattaggtacttttttgtacatccaagaaatagcatatccctgtgcttccagtgtcttatgaggttggcgaatattaccaatcacaagaacgtgtttctttttctggggcatacactcgctataaggcaaaggagtatcgacagatattagttgtaactgtccaaacaacctatcaatcagatctgtgagttctttagcggatttggcttttaataatccggctaacggaatttcactttctttataagtaaccgctttgactaaaggttgttgcatcgtaagctgattcagcattacaacctcttccttgccataaagaaactcatgccccgacaccaagccatagtttcctggcagctgatgtccaggcacaataaaccacgcatatttgtacccggtatcatagttaagttcaaatttgaagtctgggtctagcaacaatccaagttccagtatcgatggatgaatccctgtctgtaacgtcaaagtttcagctattctagctcccccgatacgatgagcgatttcaagaaacaccggccctgtatctgtttgaatcgcttcaagatggaacgcccccaaagatatatcaaccgcatttaagatttgaagcgcccaggttttcatctcttccgtggtttctaactgcacagaccctgctggatagccgttggcaaaatccagcaacgtattgatatattggctgacgacaatcatctctatttgtccgttacggatcatgccgtcgatatgcaatacaggaccggatacaaattcttcaacttcaaagttttcaatccgttcaggtgtttctttatcaagagccacaattccagttgtgcgatctataagcgcctgttccaaaactttctgactgtcaaacttgaccacatcaactgacgaagcaccatccagaggctttaaaataacttgtgaagagggaggaatcgctagtcgttctgagttcataaaatcggacaaagacatgtactgaggaatacgaatatttacagcgccaacacagtgtttcatcacaattttgtttcgaactttttcgacatcggccactttagggcccgcaatgttgagcttttctcgtatcaaggcagcctcaatcaattcaaactcattaattgaaacaacgtgatcaaagcaaacatcaagattttctatttgttcgaggacttctttgtgtacagcatccacgccgggtcttactattttggtacaacgtagatcggcaggaatttcattcagattttcttcgataccaatgtagtaaacattatgtagttcgtgatcgatggactgatggtaaagtacatcaacgtacctaactcggtgtaaaataagtatattcattagctttcatccatttcgaaaatttgttcagtcaattgttgtgtaagcatcaagtactctttcggttttccatttagctcatagtctggccagaagaattcaacataaccctcaagctctgcgttgctgtatagtggattgacccgagctccttcggatgtccaaagttgcagtccaaataccccttttggtaactcgtgctgagctggcaacttaattcgctcaatcgttccttgcttagctttcataaatccaatcgcagctagtccagacatgtgatatgcaggtacttcaacttcatcgtatagataagagcgagaatgaagttcgagcatattcactccagctattttttcgaatatttcaggaatgccaccgcctggagtacgcgcattcaactccagtaggtaaatcttgccactgtgatcaatcataaattcaacatgagctataccatgttcaacatccaagacttcacaggctttaagcgctgcttgtttaagcgcttcgttatcagattctatacttggtaaggaatggccgatttcaacaaaatgaggtaacggggtcagttctttatcggtcactgccaatacacgtcttccagttttggtatttagtacttcaaccgaaagctcaattctagcatcgacaaactgttctatctgataatcgttatctgctataccaaactcactaccataattttcggtcactcgacgcaagttagcaaaagcactagccaaatcatctttgctagctacgtaggttacaccttcactgcccccggcgttggtcggctttacaactgctggaaaaggaaaatcttcagcaagggtcgctagctgctcaaggtgattaaaacgtgcaaacttcggaacgttcaacccacctgcatgtgcagccttacgcatttcaaatttgttgcgggttaatgtcagcgctttttcagacaaataatttaaattatagtactgagcgatacgagcccccggggctatcgtcatttctgtcaatggaacaactgcgcccggttgcattccttctcgctcggcaaaggtctgtactgcagccagagcttgttcaatgttttctgggttaccgtcaatcactagatcagcgtaacggtttccattaacataaccacttggggccatgatcgctattttcatgttggttgctctagccgtggcaaccaatgcacgaaatctgtttttctctgttcctagtaacaagcagtactttgaattcatcgactcttccttaaaaactcttcgcaaattaactttgtgttattcaacaagtgccaacaccctgcaagggcttcctgaaccaccaacgatgggaagcggcgctatcatgataactgcacctgttggcggtaactttgctaggttcttcaactgagtcaggccatattttcccgccccgtgaaagtaccagtgtacggggtaaggttgttcaaattttccggcttgacccgcgtcggttccaacagtctccaccccgatacctataattggtgtttgctcagccaaccattttgcacaagcttcacttacccctggggtatgaccatgattaagaaaggtatcagcatctgagtctcgactgtcccaacctgagcggaatagcaaccaaccacctacaggtaaaggtccatggacttcgcaccattgatcgacatgttcacgttcgagtaaaaaatctggggctgttacttgatcagatacatcaattacagcggcaggcgcaaccaagtgtctaggaggtacacttgagacatcgatagaatctttgcctgaccgccaatgaacaggggcatcaaaatgagtccctgtatgctcggacatctggatattattccaataaacttctttgcctttttcgtcataacggcttattttttccaacttaaaaggccaaggttgccctcgttcaggcggcaaacgaatcacaggtgtttccgttgacaacggcgctgtaaggtcaagtacctcaactttcccctgcatgaacttcgcatagattgaagatgtcatagtattaagatttccttattctcattatgggcttaatagacaggggttgaatattcagatgtcgaattcgacatcacctcgtcttcataagcaacctgaagcttacgggtcatcaaaccaggacgcccgtccccaatagactttcggtcaacactaatcacaggaacgatttcagcgagagtgccacaggtgaaaacttcatcagccaaatacaactcggtacgatcaatttctcttcgttcacattcaaccgaaagcttatccttcgctagtcttataatgctgtctaccgtaatcccttcaagtacgcctgctgaacctggcggcgtgatcagtcggttatttttgaccatcatgatgcaagatccagggccttcagccacagtgcctctgtgatttagaaaaaacgcagtatcaaaaccatttcgcatcgcttcatgctgagctaagcggctattatggtaatttgctcctgttttaatcctcggtggcattgaatcgtcactgattcgtctccaagttgaaaacgaagccgtcatccctgtgtcataacgcgcagaccttggcataggtaatgctgtaatatgcataccagtgtcttcggtataaataagtgggtcgaagtttttccccatcgcaaaataaggagcgataaccagatgcacatgttgcttaaagttgttttttcgtactaggtcgatgcaagcttcaacaatctcttgatctgtgaaagtgacaggcatgtcaacacacttcatggaatcgcgcaggcgcttgatatgctctcgtatccgatacatatacatttgcttatccgttttattccaatagactcacacaccttcaaaaacatttgcgccccaaaaagcgccctgcgttctggcatgtaaggtacacttttcccaaggcacgcattcaccatttagccatgcgaattctggcgtattatgggtagacgacataagttaatctccgtttatgatgcttcacgctgaaacgttaaggaatcagtaccactgactttttccaggattaaactaagagacggtgcgttatcaagcaggtaatgtcctgctaaatggccatcaggacggataacaaacaatgaatcttgtttttctgtcagggtttcaaaaaacagaatatcgtcgtaagtaacactgataagtctctcgtccacttttggcgagaaatatccttttggtacagcagcaaccaaactaaaatccaaaccattataggtgtggctttgcttatttaaatactgcttcaccttatttgggtctgcgcaaaaaagacaaacaaaccctttcccgaacaacttacgtaagcggcttttttctccgtcgatataaaccactacatccggagagaacgcaccgacataaggtgtccgatggttataatcaatcaaactagaagattcgtaggtaaaaggttctgtcattttcccgtgattcacttgcttacgaagcggtttccagacttctgaaattcgcagcacggtgtcacgccagatttgcttcaaaggtgttggcgggaccatgaactgtatcgtggcttccgtcagtctcaaattctctttcgctgcaaggaacctttcctcatgataagtatccaacaattcatcccctgcgcttcctctaattactagcgccaatttccatgctaggttgtctgcgtcttgaatcccgctgttcatgccgcgagagccataaggtggaaatgagtgagccgcatcaccagcaaaaaacagtcgattgagtctgaacttctccacaactcgctggttaaaacgataggtactgatccagtcaatctgatacggaatatcaccgatgacagacttgatacgcttgtctagttggccatttttcttttcagcttcaatatccgcatctggaggcaattgccagtcgatacgccatatattgtcgggctgaggatgcatcaccaactgacggcctggattaaactgaggatcaaaatgaaagtgacgttctttggttaaagcaatatttgctttaatatcagtaactaaaaaacgatcttggtgagtgtatccggtaaagttaacctctgtcagatcgcgtaacgtgcttctaactccatcgcaggcaattacataatcaaattctagggtctccgtttcggtacagtgtcttacctctagcttaaccttgtcctgttgttgtgaataaccaacgacttcacttgaccacctgagttcacataggggattagcttccaacagcttaacgagctcttgctctatacggtattgggaaatattgacaaattcaccataaccggggcgttcggggtattcttgggtgatcctctcaacatttcgaatataggtgtgcgctatccgccaatgaatcccttcttttgcaatctgttctccacacccgactttatcaagtacttctagcgcatcgccgtggatcaggcaggccttagaaccttttcgaagcagataaggggctttatccatcacgatgctcgtaataccgaatgaagccagtcgagctgataaaatcaggccaactggacctgcaccaataatagcaatcttggttttatttgaactattcatcttagtaatctactcatcaagctgggtttcaaaaacagggatgtctttgacaaaagccaaataaggagtgccttccgtgtaaccagtacccgagccctcacccaacatcttcatcgcaagaccataatgggtttgcttccaacgtttcagcgtcgtagcaaaacttttcatggcttgtttgacctcaccaaagtcgttgctattgaaacgaccactctgttgcgcttgactcaatgcaaggtctaagttatttggccgcaccaacagtttttcttgaacttcagggacagagccgtaagcaatagagttcaaccgatcctcatccggttgtctgcatagtgattcaatacgcttgtagtttcttgattggatcgcacttgcgccttcagtatatgcacgaaacaccttaaaggattccgcacgcatagaagacagtaaatggaaaaaaccgatggcttctttaatttttttctcgcaactttcgaccagaatacttgcctggctaggcgaatcagtgcaagcttcaattgtcgccctcaaaccaactgcaatccaagagaaagtgtattcgaacgtttgtaagacccgaatgaacatatattcgtcgtgaatgagatagacgggtaaattagttgtcatcagcatttgctcatcgttgtgtgttttcctttgctctactgcggcaataaaatgttttgctgattcgataacatattccgatgaaatataggacaacttagcccgttgtacgtatggagtcaccgcttttagagccatagcacaacgtttttcaactaaagtacgttctggtaactgatgtctaaaatttccctctgttactaacccgccaagttcaaatttgagtatatccgccgtaagcagtaacatcatacggtcaatgtgggattgcgcttctgcgtatgctttaatctctgtctggtcatcaggcatgtttaacaattcaagcgccagataagagcggtagtcataagtaccgtcgtatttatccaacaagacattcaaaaaacgtgtgacttgctcaatttcctcactgtttaattttgcgcactcttttctagtaatattcaacagctcgagaaaatattcaggaacgaaatgtttacctgtcttatgatacatgcgaacaacatcctgatatgggaaggttgctttattttccttggcaaaccgcaatatggtgtgaatgctaagattaatagtgattgtttctgaatcactgtaatcacaaagcaaactagtaaatcttggatgctcaagttctaatatatccagcactgtaaaactttccttttattataatttattgaaataattaacttatattcaccatatttgggttttgaagtacgcgcaaatcaatctacatgtttgaacaacttcgtctgccgtattaaagtgatgaaacgcaagtctgagcatctcacctcgcgggcttgtaattatcttgtgctgttttaagtgcgtgtccaatgcaggaacatttggaacaagcaaagcaatatgcgccgaaaataatgttccggggacctttacgattgtcacgtcgcctttttccaaaatgtcgatagcaagttcaactaatgtctgaatatgcagccgaccttgctcaaaatctaaagtcaaaagtgcagttaaggcgctgcttgccgcataaagcgcgggcacagcaggagttccggtttcaaatcgtttggcgcaatcggggaaatccaccaacgatgggttaaaagcaaatggctctttacgtccttgccatccagtcagccccagtgcaacggtgttacgaatgccatcttttacataaaggaatgcaatacctggcaaacctaacatgtacttcatgctgccacagatcaggtaatcacaattcaattcactgacattaattttttcagcacctagcccttggtatgcatcgactaatattggaacttgtgattgattagcgagttctgttattaattcgaccgggtatcgtctacctgtgcggaaactggctaacggtactgaaactaaacatgtattgctgcccaacattgcgcaggtaatggtgacaaaactttcgtctgaaacctgactttctatgcaacgcgtgacgagtccacgactcgcttgttgcaaccaaacatgggacagagacggaaattcatcttccgtacaaagaatttgttctccggaattggctactagcgttgaaataacctgataagcagctatcgttgcgtttggcaaaatcgctatttgtgatgcatctgcgcctataaactcagcaaacaagcgcctggcctgttcggtttgccgctcgaaatacacccacgccagctcattttttgccatatcaactagcatcgtttccatcgctgcatcaaggaactgagaacgaggagaaatactacaactggcaagatggacaaggccatgcaacccgctaaaataattgtcccgaaatgcttgaggtgaatacatagcgactagtaactgttggtattagtcatttcggtacgcaattcccacagttctggaaagaattgcttattcatcagcaccgtcagtttttcaatcggagttcccttggtacctatcgtgttaagtccgatagtacgtactgcgattttataatgtctgctgcgccataaactgaccatttcatcccagctcaccatttcttccattaggaaataaagcggcgacttgtcttcctcggtataaacgcccatcaggtcgatactcatagacttaacaatacgaataaaagtttgatggagttcccgcccaactgattgcaaccgcctccagcctggagattcgaagcctgagccgttgcctaatgcaggtcttactttctgaaagtcatacggagtcatgtatttgaacatttcgagttgcttagtaattaactcaataggatagctggaccgcttaatcaactcggttgcagcaacaaagtctttcttggatagcttttttatcgcttcagccaactcattattgctcagtttcagccaaagctcagtagattgatgaaccacctgaaacaataattcatcacggtggagcatcttttctggcgttacttgcaaattgagcagcgtgggaatgcgcatatacttctcataatcgctatccccttcaccagacagtacacttgttgaataatccctatttcctatcacgttctttctccttcacaaaaacggatcaaagccagccttttatttgcaaaatatcagccgtcaatgtagtgaattaataattcgaacgggcgtcaatgtatataaaacagtgataaatcacaacataaaaaaaacaaaaacaacaaaaaacatacagttaaataacttaatgcgtatttcggtgattgtgattgcctgtttccgctttttctctctcttcctatttttacgccgctgtttttcaagttagttgtcgctaaaatcgcatttatttttctatattttcagaaaatcaattaaacgctgacttttgtagtggctttcttcacgctggcctgatgttttgcactcgggatggcgatgataaaaaaacggggattagtgttttgctgggagggggctgtattgcccacgatgaagtctgccgtggagcgcatggaggttattttgcagattttctgcctagttttcccatgtgataccctcgcagcccggtgcagattgacgtttaagttgctgaaaaatctgacataacagttcttcactgatgtgatgaaaaaggtgagtaaactgttgtttcctatccttctttgctgcttttcgcacagccagcaagcgtaacgtcgtattgacaaagatggaatttgaaattttcgatgttgaaaaactatttttaaccagcttttttaacgatctgaggccactttacagcggcctcatagataagaatttcttattagttatcacttgccagcaagtaaatctttcaccgcatcaccgatgtctgccagactgcgaaccgtcttcacgccagccgcttccagagcagcaaatttttcatctgcggttcctttaccacccgcaataatcgcaccagcatggcccatacgcttaccttttggtgcagtcacacccgcgatgtaggcaacaaccggcttagtaacgtgctgtttaatataagctgccgcttcttcttccgcagtaccaccaatttcaccaatcattacaatggcttctgtttgcggatcttgttggaacaatttcaggatatcaatgaagttagaaccggggatagggtcaccaccgataccaacacaagtagattgtcctaaaccggcatcagtggtctgctttaccgcttcataagtcaatgttcctgagcgggaaacgataccaactttacctgctcgatgaatgtgtcccggcataataccgatcttacattcatctggcgtaatgactcccgggcagttagggccgatcatacgcacacccgcttcatccagttttactttaaccgccagcatatccagcgttgggataccttcagtaatcgtgatgatcagtttgatacctgcgtcgatcgcttccagaatggaatctttacagaatggcgcaggaacatagataacagaagccgttgccccggttgcttctaccgcttcacgaacagtattgaaaacaggtaatcctagatgttcagtaccacctttacccggcgttaccccaccaaccatttgggtaccataagcaatcgcttgttctgaatggaaagtaccttggctgccagtgaaaccctgacagataactttggtgtttttatcgattaaaatagacattattattttgcctccactgcggctactgcttgcttagctgcgtccgtcaggctggttgcagcaatgatattcaagccactatcagccagttttttcgctcccagctcagcattgttcccttccaaacgaacaacaaccggtacgtgaaccccgacttcttccaccgcaccaataataccgtcagcaatcaggtcacaacgaacaataccaccaaagatattaaccaataccgctttcacgttttcatctgacaggatgatcttaaacgcttctgtaacacgctctttggttgcaccaccaccgacatcaaggaagttagctggcgccccgccatgcaatttaacgatatccatcgtccccattgccaagcccgcaccgtttaccatgcaaccaatattgccatccagcgcaacatagttcagctcccactgtgccgcctgagcttcacgaggatcttcctgagatgggtcatgcatttcacgcaattcagcctgacggaacagtgcgttaccatcagcgcccaatttgccatccagacaaatcaaatcaccttgagtcgtaataaccaatgggttaatttcaaccagagccagatcgcgctccaggaatagatttgccaaccctaagaaaattttagtgaactggctaacttgtttaccggttaaacccaatttaaatgccagttcacgcccctgataagacataggaccaatcagcgggtcgataatcgctttatgaatcagttccggggtctcttccgcaactttttcaatttcaacaccaccttcagtagaggccatgaacactacacgacgtgtaccacgatcaaccacagcaccaagatacagctccttcgcaatatcagttgccgcttccactaaaatctgacgaacaggctgcccttgcgcatctgtttggtaagtgaccaaacgtttgcctagccactgctctgcgaaagcgcgaatttcttctttactgttaactactttcacgccgcccgctttaccgcgaccgccagcatgaacctggcacttcaccacccaagggccagagccgattttagatgcagcttcttctgcttcacgcggtgtcgtgcaggcataaccagccggagcgggtaaaccataccgtgcaaaaagctgttttgcctgatactcgtgtaaattcatgatgttctatccataattaagtctgagaagagcaaaaaatgggtaagttgctctctgatttttttgttgctctggatatagccaatctctaaagattggctgttcatatacatttgtttacttcagactgggcagatattagcgcgtatctgccctgattatgttgctatacgtccagcagcaaacgtgcaggatcttccagcatttctttgatggtcaccaagaagcctacagactcacgcccgtcaatcagacggtggtcataagacaatgccaggtacatcattggaaggatctccacctgaccattaaccgccattggccgatcttttatagcatgcatgccaagaatcgcactctgtggtgggttaatgattggtgtagacattaaggagccgaatacaccgccattggtaatggtaaagttaccacccgttagctcttcaacggtcaatttgccgtcgcggcctttgatagccagctctttaatgcgtttttcgagatcagccatgctcaacgcatccgcatcacgcagtactggcgttaccagaccacgtggtgtcgataccgcaatactgatatcgaaatagttgtggtaaaccacatcagtgccatcaatagaagcattcacttctggatagcgtttcagtgcttcaaccacggctttcacatagaaagacataaagcccagacgcacaccgtggcgtttttcaaacgcctcgccgtactgtttacgcatttcttggattggcttcatgttaacttcattaaatgttgtcaacatcgcggtgttgtttttcgcttccagcagacgttcagccacacgcttacgcaggcgagtcattggcacacgcttttcactgcggtgtggcaacagagaaccctgggcagaagcagcagaggattctgctggcttgctagccactttttcgttatcagccatgtatttttccacgtcttcacggacgatgcgtccaccaaccccactgcctttaatcgctttggcatcaagatcatgctctgcaatcaaacggcggaccgccgggctgagtgcatcattgctctcttcgtctaaacccgccgtctggcgtttcgccaaagttgcttctgttttttcttttatttctgccggcttgccggtgctatcgcccaagcggatacgaccaagaagctgacgggacagaacggtggcatctttctcttctaaaatggcttctaaaacacccgcctcactggccggcacttccagcacaactttatctgtttcgatttcaaccagcacttcatcacgttcaacacggtcaccctgttttttgtgccagactgccacagtggcatcagcaacagactcaggcagatccggaaccagaatatctacgctactcattttatatcctttatttattcaacgttcagtgcgtcattaaccagctcttgttgttgttgctggtgaactgacatatatccaactgccggggaagcagacgcaggacgacctgcataacgtaaagaagccccgaacgggatcacttcacggaagttgtgctgactgcaataccaggccccctgatttaatggctcttcctggcaccagacaaaatcatgtacatgagcatactgttccagtgttgactgaacatcttgatgagggaatggatatagttgttcaatacgcacgatagcaacatcagtttgttcatttttacggcgttgctccaacaggtcgtaatagactttacctgagcaaagtaccactcgtttaatacctttcggatccagagcatcagtttcaccaataaccgtctggaatttaccgttagccaactcatccaggctagaaacggctaatggatgacgcaacagtgattttggtgacataacgatcaacggacggcgcataccgcgcaaagcctgacggcgaagcatgtggtagacctgagccggcgttgacggcacacaaacctgcatgttctgttctgcacacagttgcagataacgctccaaacgggctgaagagtgttcaggtccctgcccttcataaccatgcggtagcaacattaccagaccgcacatacggccccatttctgttcaccagagctgatgaattggtcaataacaacctgtgcaccattggcaaaatcaccaaactgtgcttcccagattgtcagagcgcgaggttctgttgttgcatagccatactcaaacgccagtaccgcctcttccgacagaacagaatcccaaacattaaatgctccctgaccgttatgaacgttcgccagaggaacataaacagaaccgttagcctgattatggataaccgcatgacgatggaagaaagtaccacgaccggcatcttcaccagacaaacgtaccggaaccccttcatccactaaagttgcataggtcaatgtttccgcggcaccccagtcgaacaatttatcgccgtttgccatctctgcacggtcgttataaattttcgctacacgcgagtgcattgtcacttcttccgggacagaactgatgcgtctaccgagatcctgcaaacgtttaacatcaactttatgtaggtattcttcatcccattcgtgattaagataaggctcccaagtaaatgagtgcagccccattgaacgccactcatcaacgacacaatcaccacggtcaagggcatcacgatacaggttaactatctcggtcacatcatcgactgatatcaagttctcagccaccagcttgtcaccatagattttacgtggcgttgggtgtttcttaattttctgatacatcattggctgagttgcacttggctcatcagcttcgttgtgaccatgacggcggtagcaaaccaaatcgatcatcacatcacatttgaaggtattacggaaatccagtgctaggcgggtaacaaatgccaccgcttctggatcgtctgcattaacgtggaaaatcggtgcctgtaccattttgataatatcggtacagtattgtgttgaacgggcatcttttgggttagacgttgtgaaaccgatctggttattgatgatgatacgaattgtaccacccacttcataaccacgagcttgagacatgttcagagtttcctgcaccacgccttggccggtaacagcagcatcaccgtggatagtgattggcaataccatattactgcgaccttcatccagacggtcacggcgggcacgtactgaaccaataacgacagggctaacaatctcaaggtgagatgggttaaatgctaatgccaaatgaaccttagccccctcagtggcaaaatcagacgagaaaccttgatgatatttcacgtcaccggtaccgagatgctctttatgcttacccgaaaactcatcaaacagatcagccggttttttacctaagatattaaccaagacgttgaggcgaccacggtgagccattcccagcacaacttctcgtgtgtcatgtttacctgcatggcggataagatccttcaacatggggatcagcgcatcacccccttcaagagagaaacgtttcgctcccggaaacttcgctcccagataacgctccaaaccttcggctgccgtcagttccgccagaaaacgatgtttttcctctacgctaaactgagagctgacagtgacagactccagacgctgctgaatccaacgtttttcttccgtattggtgatatgcatgtattcagcaccaatagaaccgcaataagtgcgtttcagtgcttcatacaaatcagccaatttcatcgtctctttgccgatcgcaaaagaacctacgttaaatgtttctgcaaaatccgcttccgtcagattatggaaagccggatctaaatcaggaacactatcctgtttccataatcccaacgggtcaaggttcgcattttgatgaccgcggaagcgaaatgcgttgatgagctgcaaaactttaacttgttttgcatccatcgctggatcgctgacagaggaatgataacgcgtagtatctttcgcaagacggcggaagtaatcacgcgtctgcgagtggagttgttcaccgctgagtcccgcattcggcaattgttggaaaatctctctccaacttgcatcaacggagtttggatcggttatatagtcttcatagatctgctctacgtaagactggtttgaaccagccaggaagcttgaatccagccagtccttcattgcgccgttctgcattgtgatcccttaagctttaaaagctttagttttcgccgtggttaactattaccgcttaaatacggtatcgataaaaggttcatttggacgtgctttatgcatgttctcttttgggtttaggaacccttcaaggaacctttaaaaaccgcctaaccgtttttaaaggttcctcacttcaagcttttgtcatcattagcagttggcaactcatactcttcaattctttgtgccctccacggagaaaatctcgcggagggcaggacctattacgcactatgctttagcaacatagacttaatatggcctatagcttttgttggattcaaccccttagggcacacactgacacaattcatgatgctatggcagcggaaaacactgaaagcatcattcagcttatctaatcgtgaagccgtttcagtatcacggctgtcaatcaggaagcgatatgctgccagtaagcccgcaggcccaataaatttatcaggattccaccagaatgacggacaggaagttgaacaacaagcacacagaatacactcgtacagaccatcgagtttttccctttgcgcaggtgactgcaaatgttcacgtgccggtgggtttttaccgtcattcagcaaatatgggcgaatcttctcatattgcgcatagaattgccccatatcgaccaccaaatcacgaataaccggcaaacctggcaacggacggataacaattttcttgctaccacgccgcaaagccgaaacaggcgtaatacaagccagaccatttttaccattcatgttgaggccgtcagaaccacaaacaccttcacggcaagaacgacggaaagagagtgttgggtcctgttctttaagctggattaacgcatccagcaacatcatgtcacgcccttcttctgcttccagcgtgtaatcctgcatatgaggagcgctgtcaacatccgggttgtaacgataaatcgaaaattcaagtttcataatctattcctccgcaactggattaccagcaactcattagtaagtacgcgctttcggcgggaatgcttcacgcagctttggctgcatgttgacatcacgacgagtcatggtctcagtttgcggtagatagagggtatgacataaccagttcgcatcatcacggtccggatagtcgaaacggctgtgagcaccacggctttcagtacggaaattagcagcagcagccgtagaaaatgccgtctccatcaggttatcaagctccagacactcaattctctgagtattgaactctgaggaagtatcatccagacgcgcactcttcaagcgttcacggataactttaagttcctccagccctttcgccattgcatcaccttcacggaataccgagaagttgttctgcatacacgcttgcaaatctttacgaattttaaccggatcttcacccgtacgggtactattccaacggttcagacgttgcaaagatatttcaatatccgattcgctggcttcgcggctagtcccttgttccatcaacgattctttcaggtgcaaaccggcagaacggccaaacaccactaagtccaacagcgagttcccccccaaacggtttgcgccatgaaccgatacacaggcaatttcaccgacagcaaacagacccggaataaccacatcttcaccgttttcgttaaccatcagagcctgaccggtcactttagttgggattcctcccatcatatagtggcaagttggaataaccgggataggttcttttactgggtcaacgtgggcgaaagtacgggataactcaagaatgcccggcagacgagattccagcacctctttgcccaaatgatccaatttcagcttggcatgaggaccccaaggaccttcacaaccacggccttcgcggatttcgatcataatggaacgtgccacgacatcacgaccagccagatctttagcatttggcgcgtaacgctccataaagcgctcgccatctttattcagcaaataaccaccttcaccacggcagccttctgttaccagaacacctgctccggcaataccggttgggtggaattgccacatttccatatcctgtacaggtacacccgcacgcagcgccatacctacaccatcaccggtgttaatgtgggcgttagtggttgattgataaatacgaccggcaccacccgttgccagaatcgttgccttcgctttgaaataaaccacttcaccggtttcaatagagatcgcagtacaaccaacaatagtgccatcctgatttttaaccagatccaacgaataccattcagaaaaaatagtggtgtgattttttaagttctgctgatacagcgtatgcaacagggcatgaccggtacggtctgccgccgcagcggtacgtgcagcctgttcaccaccaaagttttttgactggccaccgaatggacgttgataaatacgaccgtcatccaaacgcgaaaatggcaaccccatgtgttccagttccagaatggcctcgggcccggtcttacacatgtactcaatcgcatcctgatcaccgatatagtcggagcctttcaccgtgtcatacatgtgccattcccagttatcgtcatgggagttacccaacgcaacggtgatccccccctgcgcagatacagtatgagaacgggttgggaatactttggaaatcaaagcacaggataatcccatttgtgaaatttgtagcgcagcgcgcatgccagcgccacctgcaccaataacgactgcatcaaactctcttactggcagtttcatctataccccccacaccacaattgttccgtaaatcaagtaagccatcagtgcaacgataatcgctaattgcagcattaaacgcagtgccagcggctttacatagtcagtgagtacttgccacataccaatccaggcgtgagccagaatggaaaacagtgtcagcacagtgaagactttagtgatggatgaggcgaagaaaccccgccagacttcataagtgatatccggcgttgtaacgataaagcccagcatataaagaacatataaaacaataatcattgcggacgcgcgcaataatagccaatcatggatacccgtgcgacccaatgcagatgcgttacttaccataccagtactccagccagaatcgacagaataacagcaatcccgattgccactttggcagagagactaccaaccgctaagttttcttccaagtagccgaaatccatcagcatgtggcggacaccaccacagatatggtaagccagtgcagtcagaatgccccacacaataaacttagcgaaaaatcccgtcataatatcggcggcttgctgaaacccttcttgcgaggatagagacatttctaacaaccagaggagaattcctactgctacgaaagtatgacgccggagacacggtgcaagatcgagactattgcagagactggaaagtgtatcgtctgcaaatcaaggttgacaggtctttgttttttcacaattttgcccacacagctcttttattattttccttcctccggacttgggcggaaatcagacagcgataagaggatacaaagacacaacatttaatcaaacgatagatccttcatgattaaaaaagtgttgtgatttagttacgctgggtgctcctacagcagggtaatccggagacctggcggcagtatatgtgcttcacattattattacaattccaacacaatatgattagctacatttccactgaacagtgattaagatcacgattcaaacatattgcacaaaattaattatcttgtttgacaaactttaaacatttatcttacatatatggttgaaaacacttttgagattgatttttggtaagaggaaagacctcaagaaaagctaaagttatgtaactgtgtagtccgcacgaatcataatcatttttgtagtcaatgcataaaacataactctcaaaaattcgctaacaacctgaaaaccattgtcgtccggggtgagatttcagccttaaatgtgatattggcctgatttcagcttttccccggtagtacagtgtcaggggacacagtataagaacctattccaccaggcatcataggtatagaccattcttgtcaataaattgggaacacagattgcacagcaaccggagtatgcgcacaatctgtaagaggcgattcacccacaaatcgctcaccggcgctggccacaccaaagtgcattcaaaagtgaccgcttttgtcagagcactgtccaagcccgttcttgatgacaaagaatagtcgataaaatagcctgacaagatagactctatacggtgtctttctgccgtggttgttaagagttataaaaatgaaagcgctaaggagactgtaatggcagataacaaagcaactctagccccagacggttcagttgctattgaattggacgtgctcacaccgacccttgggtccaaagtcatcgacgttcgtactctcggctcccaaggtttctatacctacgatcctggttttacttccacagcatcttgcgaatccaagatcacttacattgatggtaacgaaggtgtattgctgcaccgtggtttccctatcgaccagctagcgacaaaatccacttatctggaagtctgctatatcctgctgtatggtgaaacaccaacacaagaacagtttgataaattcaaaaaaaccattacccgccacaccatgattcacgaacagatccatcgcctgttcaacggtttccgccgtgattcgcatcctatggccgtactgtgtggtgttactggcgctctggctgctttctatcatgatgctctggacgtgaacaatccacgtcaccgtgacattaccgcctaccgcctgctgtcaaaaatgccgacagtggccgccatgtgctacaaatactctatcggtcagccattcgtttatccacgcaatgatctctcctatgcaggcaacttcctaaacatgatgttcgctacgccgtgtgaagagtataaagtgaacccagtactggaacgcgctatggatcgcatctttatcctacatgcggaccatgaacaaaatgcatctacctcaacagtacgtaccgcaggttcttctggcgctaacccatttgcctgtattgccgcaggtatcgcttctctttggggccccgctcatggcggcgcaaacgaagcttgtctgcgtatgttggaagaaattcagtcagttgaacatattccggaattcattaaacgcgccaaagataaaaatgatgctttccgtctgatgggatttggtcatcgcgtttacaaaaactatgatcctcgtgcaaccgtcatgcgtgaaacctgccatgaagtgctagatgaactcggcctgaatgacagcctgctggaagttgctatggaacttgaacgtatcgctctgcacgatccttattttattgagaaaaaactgtatccgaacgtggatttctactccggcattatcctgaaagcaatgggtattccatccactatgttcactgttattttcgccattgcccgtactatcggctggatcgctcactggaatgaaatgcatgatggtggcgtgaaaatcgctcgcccacgtcaactctataccggctacacaaaacgtgatttcgatagccagcttgaaaaataataataaaatcccattacgatagaaggcagagctctaacttaatcgttagggctttatttaattggaaagattattcggtgagtacggcttaaagcaccgtcaaaattgatctcatcaccttccttatgtatgctcgttatccaagagtaggtacaagcgacttactctctaaattatcaaacgtagcctctatttgcgtgtgtagcgagatcaccaagatcaaaattcacagctctatgaatcggatagaataacgttattgacaaaaaaacgttagttatgaaaagcctgtcaaaagctttgaagcccgccgttggtgggcttcgtttatttccgtcttaggaaaacgtgattaaaccgggtttggaatatcgataaaagtgacatccagaccataatgaccagccaaccactcccccaacgccttaataccataacgttcggtggcatgatgacccgccgcataaaaatgcagccccatttcgcgggcgatatgaaccgtctgctctgacacttcaccggtaataaaagcatcaacaccaaattccgccgcctgttgaataaaactctgaccaccgccggtacaccaagcaagcttgcgaatctctgcgggtgcattgtcaccgacatacaacgctttgcgacccagcgcctgttcgatacgtgcagctaactccaccggtgttattggctgttcaaattccccatgcggcacgaatggctcaaccaacccgaccactttcgcattaatcagacgggccaattgcacgttatttcccaatgatggatgggcatcaaggggcagatgataaccatataaattgatatcattacagagcagcgttttcaggcgattacgtttcataccacgaatcactgccggctcatttttccagaaatagccatgatggacgataacagcatcagcctgaaggcgaaccgcttcatccaataaagcctgacaagcggtcacaccagtaacaattcgctgaatatgagcacgcccctcaacttgtaaaccattgggggcataatcctgaaaatcaccaacattcagctcttggttaatgacattttccagctcaatattacgcatcatatttgtcctgtgtattgattgtatgacaataatataccgttacctgccgccaattgtcagttgtcagctacttttgattgccaaaacctgctctgactgttttaaccatacgggcttatcgctggtttttacccatacacgatacaaataactgtaaaaacgggcgcgatcacgacgaaacaacataaccggaaacgccaggataccgaaagtgacagcgccaatacggcgtaaaagaacttgataccaaggatactcacgatatgaagacatattagtcctccttaaaatgatcccacttttccgcaggatcttaaaaataatcaatctgtaaattgtttaaaattttatcgcaaaaaatgaaaatttaccacttatcagaccacttttaagccgttattgtcgctatattttctattttatgtaattttattacataaaatatgataaaaatgtaatattacaaacattttattaacagttggtaaaaatgggatcaacgataatcagagtcaattttttcatgatccttgatcctattcctataatcatcgatttcactttgctttaggaaaagaactagactcaatagataattcttattgaaaaaaataaagaaattaacgaaatagccatgtgaaaatatccttttgattctggcaatagaacaaggattgccaatataataattttcattgataattattatatgagcacggaaaaatgatgtcatcctttgcaccatgctgttttcccagaatacttgtgaattaactataataggaggaaagatgaaagcattaactgttatattattgatattaataacaaatgtttcaggctgcgtctccaaaaaacacgctttttctattgactataaagcaaatggtgaaacttttcatttaactccattatgtatagaagaaatttttccggaaaaaggggataattactattccattttcatcaaagtaaaaaataactctcattgtagcaaaccatttaatctttttataaagcaaaacgtaggaaaaaaactatctgttttctttaacaataaaccaatattgaaaaataccaatataattacgccaatgcatgtcgaaaatggcttctatcaggcaatagattcgaatataacatttgaagaaatagtcaactctttaaattgatgaaaatctatggcttttttcccgaaaaaaaccatagattaattaaatatttttttaaacaattcatatatacccgtaatcattgaagatgcttgattttatccgaaatggagatcattatcctcgctatgaaaatattcattaccgatgaacaaaaagccgaacttgaacatctccatcacacctgccgtgataagagggagtgtgatcgcatcaaagcggtcctgctggcctctgaaggctggagttcagtgatgatcgctcaggccctgcgtcttcatgaaatgaccgttaaccgtcatatcagcgattaccttaatcaaggtaaacttaaatctgataatggggggtctgatagtttgctttctcaagaacaaactgattttttaatcaatcacttatctcaacatcttttccatcacacccatgaaatcgtggcctatgttgctcagctctggaatattacctttagcattcccggcatgaataaatggctacaccgtcagggtttttcttataaaaaaccttgtggcgtccctcataaattcgacgcagaaaaacagcgacaatttattgaatattatgagaatcttaaagtcacagcgaaagacgaacccatcctttttcttgatgctgttcacccgactcaaggcaccaaactcggttatggctggatgcgaaaaggcgagaaaaaaacagtaaaaacaacaggaagccggactcgcctgaatatattgggcgcgctcaacctgaatgccattggtcgtacggtgttccaggaatatcaaaccatcaatgactacaacatttgctgttttttcaatgaaataagaaagtcttatcctgactatcatcaaaaaattcatcttattgtggatggggcgggttacaacaaagctcatcttgttaaggagtgggcttatgttagcaatattgagttacattaccttcctccctatagcccaaatttaaacccaatagagcgattatggaaggtcatgaatgaacaggttcgaaataaccgttattttgcggataaacatgaatttcgagacaacgtcttcaaatttttcaccacaacgctaccggatatagcggactcgctgatgtctagaattaacgaccattttcaggtgctaaaaactgcatcttgaagtttcttgggtatatagcgtattttttaaatcctaataagaaactgtaatttaaattgtgtaatcgcctgtttttggcatatttgatttatcaactaaaacaagtgaaatgatggaccaaaaacagttacaagctctggctaaaagccttaaaaccccctaatgactttggcctccttttattgccatttttatactttttttacacatctcctcactcttttatcagcttctttgcatccccttctctaatctttacccaatggatttcaagatgaatcgcgacggcaagggagcgaatccccgggagcatagataactatgtaactggggtgagtgagtgcagccaacaaagaggcaacttgaaagataacgggtatttacccatccaagttttcaggagataagcagtgagcatattcttcatttccggcgcgttattagtagccctgttactggtttatctgatttacgcgctacttcatgcggaggatttttaaatggcagcatccgcttttttattgatcaccagtttcttactgattttgatgctactggcaaagccactcggaaatattatcgccaacctgatcgacggtgatattccacgctggctaacaaaaatagagtctggcctttggcgttgctgtggcttacagaaacctggcggcacagtcaaagaaatgaactggtggcaatatgcattagctatcactatttttaatctaaccggactattactgctattcacgcttttagtcacacaacacgccctcccccttaatcctgaacatttccccgggctcaaatgggacctagcgctgaatacagccatcagctttatcaccaataccgattggcaggcatacagtggagaaaacacactaagttactttagccaaatgacaggtctaaccgtgcagaactttctttctgccgcgaccggtattgcggtggcatttgcgttgatacgcacattttcccgtcacggtgtcaacaccgcaggaaacgcttgggttgatatcacacgtatcacactttatctgctattaccgctgtctatggttatcgctctagtttttgtcagtcagggcgtgattcagaatttcgagccgtatcaattagctcataccattgaaggccaaccgcaattgatcccgatgggcccggtcgcttcacaggaagccatcaagttattgggaaccaatggtggtggattctttggggctaattcatcacacccctttgaaaatccaactgctatcagcaatttcattcaaatattgtctatcttcttgatcccttgtgcactctgttttgcctttgggcaagtggttggtgataaccgtcaagggcacactctattgtgggcaatgagcatcatcttcgtcattgccaccgtaggcgtcatgtatgccgaactgaaagggaatctccatttcagtctgttaggtgccaacagtaatatcaatatggaaggtaaagagaatcgctttggcatcctcgcaacctccatttatgccgtcgtaaccaccgccgcttcctgtggcgcagtcaatgccatgcatgattctttcactgcgcttggcggcatgatcccaatgtggttgatacaaattggcgaagtcgtgtttggcggtgtgggttctggtttatatggtatgttactgttcgttctgctaaccgtttttatcgccggtttaatgataggccgtgcgcctgaatatctcggtaagaaaatcgaagtattcgagatgaaaatggtggcactggcgattctggttaccccgacactggctcttttaggaacggcacttaccatatccactgccagtggacgcgccggtattctgaaccccggcgctcacggtttcagtgaagtgctctatgccctctcctccactgccaacaataatggcagtgctttcgccggcctcaataccaacaacatgttctacaacttgttgctagccatcatcctatttttgggtcgctttggcatgatcctgccagtacttgctattgccggctcgttggccgtaaaaaaacgccagcctgccagcaacggtacactgcccacctatggcccactgtttatcagtctattaattttaaccatcatgctaatcggtgcgttgacttttattccggctcttatccttggcccggtcattgaacatttacaaatctggctaatggctcggtaagcgccaaagagaggaataccatgaccaacaaacaacaaacattattcgaacccgttttgattcgtaatgccctgatggattcagtcaaaaaatgtcatcctgctgcacaatggcgcaacccagtgatgtttgtcgtctatctaggcagtggattaactaccattttatggattgccatgttagcgggtcaatttaagggaaatgctttgttcaccggtaacattgccttatggctatggtttaccgtgctattcgctaactttgccgaagcgctggcagaaggcagaagcaaagctcaggcggccagccttaaaggggtaagaaaaaccagttgggcaactaaactacactcagccaatcgtaatggttccagagagaaagccccttctgacagcctacgcaaaggggatatcgtcattattgaagccggtgaaaccatcccttgcgatggtgaagttatcgaaggtggcgcttctgttgacgaaagtgccatcaccggagaatctgcccccgttattcgcgaatctggcggtgatttttcctctgtgaccggcggcacccatgtactatctgactggctggtggtcgaatgttcagttaatcccggtgaaacgtttcttgaccgcatgatttcaatggtggaaggggctaaacgtcgtaaaaccccaaacgagatcgcactgactatcctgttgacagcgctgacaattatctttctattggtgtgtgtcactctgctgccattttcaatattcagcgtggagattaaccattctggccaacctatcactgtcacggtattgatagcgttattagtctgtcttattcctaccactattggcggtttactttctgccattggtgtcgcaggcatgagccgcatgctaagtgcgaatgttattgccaccagcggacgcgccgttgaagccgcgggtgatgtggatgtgctgctactggataaaaccggcaccatcactttgggaaatcgccaagcctctcagtttctgcccgtgcctggcataacagaacagcggctggcagatgccgcccaactctcttctttagccgatgaaacaccagaaggccgcagcattgtcattctggcaaaacagcgattcaatctgcgtgaacgtgatctgcgctcactgaacgcaacttttgtgcctttctctgccatgactcgaatgagtggtgttaatgtggaaaaccgcatgatccgcaaaggcgctgtcgatgcaatccgccgccatattgaagccaatcacggaaaattccctgaagccgtggaaattttggtacagaccgtggcgcggaaaggcggtactccgctggttgtcgcagaaaatcaacaggtactgggcgttgtcgcgctaaaagatatcgtcaaaggcggcattaaagagcgattcagtgaaatgcgccgtatgggaatcaaaaccgttatgattaccggcgataatcgtctaaccgcggctgcgattgccgcagaagctggagttgatgactttctggcggaagctacccccgaagccaaactagccctgatccgccaatatcaatccgaaggccgtctggttgccatgacaggtgatggcactaatgatgcccctgctcttgctcaagccgatgttgccgttgctatgaattcaggcactcaagcagccaaagaagccggcaatatggtggatctggattccaacccaaccaaactgattgaagttgtccatattggtaaacagatgttgatgacacgcggctctctgaccacattcagtatcgccaatgatatcgcaaaatattttgccattatccccgcggcatttgccgtcacttacccacaattaaatatcttgaatatcatgcacctgcactcgcctacttcggcggttttatcgaccgttatctttaatgcactgattattgttttcttgatcccgctagcgctaaaaggcgtgagctaccgcccaatgaatgcatcagcgcttttacgccgcaacctgtggatttatggtctgggtggtctgatagcgcctttcatcggcatcaaactgatagatctgttgctgactttgctgatacttaaataaaggtgatgaaaatgatttggttacgttcttctgttgtgttgttgatatttctgacactgattaccggcgtagcttatccattgctggcaacaggtttgtcagaactgatgtttccttatcaagcccaaggctctatggttaaacaagatggtcaaaccgttggctctgagctgattggtcaaccctttactaaagcgatctattttcagggtcgtccttctgctaccgtagattatccctataacaccctgtcctctggcggcagtaatttagcgactaccaacccgatattggatgatgaaatcaaacgcagagttgaacaactgcgtcaatttaatcgtcaacctgatatacctgtgccggttgatctggtcaccgcatccgcaagcggtcttgatcctcacatttcacccgccgccgctgactttcaagcacagagagtcgctgatgcacgccatttaccgattaaagtgataaaacaattaatcagggataatattgagcaccccccatcggaattcctcggtgagcccgtaattaatgtgttaaaacttaatcttgcccttgataatttaccagagaaaaaacagtaaggctgaatatggatcaacacgaaccacagcgccctgaccctgatgaattactgacactggttaatgagaaacagcgcggtaaattaaagatatttttcggtgcctgcgctggcgtcggaaaaacctatgccatgttgcaggaagcgcaaagattgcgtgctcaaggactggatgtggttatcggcgtggtagaaacccatgagcggcaaggaactgccgctttacttgatggtctgccacaactgccactgaagcagatctactaccgacggcgcaaaatcagcgtctttgatcttgatgctgccattgcccgccacccggccatcattttgatggatgagttggcattcagtaatcctcacaccaaccgtcatcccaaacgctggcaagacgttgaagaactgcttgaagctggcatagatgtactgactaccatcaacgttcagcatctggaaagcctcaatgatgttgtgggggatattaccggtatccgggtcagggaaaccattcctgatcatatctttgatcaagcgaatgaaattgtcttagttgatctgcccccggatgatctgcgccagcggctcaatgaaggtaaagtctatattcctagccaggcagaacgtgctattgaacatttttttcgcaaaggtaatttgattgcattgcgggaactggctttgcgccggacggctgatcgggttgatgatcaaatgcgtgctttccgcgacacacaagggcatgaaccggtctggcatacccgtgataatcttctactatgcattggtaacagctcaggtaatgaaaagctcatccgcactgccgctcgccttgcggcccgattaggctgtatctggcatgcaatctacgttgaaaccccaaaactgtaccaactacccgaaggtaaacggcgctccatcttaaaagcgctcagattagcgcatgaattgggggctgaaaccgcgacgctttctgatccaaacaaagaaaaagcggtattacgttatgccagagaacataacctcggcaagattctgataggccgccgctgtacatccaaacagaaactgtttggctggcaatggcgttcaggttttgctgaccgactagggaaactagggccagatttggatctggtgattgtcgcattagaagaacgcagccactgggataaagaacaagacaaccgctctgtgagtgaaaaatggcgagtacagattcagggctgcctgatcgcgattgcgctctgtacacttatcaccttgttctcccgaacgtttttactgacccttgataaagccaatcttgtcacgctttacctgcttggcgtcgtcgtcattgcgctattttacggacgccgaccatcaatctttgctgcttttattaatgtcattagtttcgatatcttctttgtacagcctcattggtctcttgctgttaccgatatgcagtacctgctgacttttagtgtcatgctgatagtgggcgtcgtcgtcggaaacttaacagcaggaatgagatatcaggcgcgaattgcccgttaccgcgaacaacgaacccgcaatctctatgaaatgacccgtgaactgagccgagcgctgaatgaagaagatattgcccgcaccagctaccactttcttactaatggttttcaagctaaaactggcctctttttacccaacgacgatggcaatttatatcaactgacgaccaataatggcggtcacatgctgattgatgatgccattgcaaaatggagttttgataaaaacctgccggccggagcgggaacagatacgctacctagcgtaccttaccaactacagcctatcgccacaccttctcaaacactggcggtattggctattgagccctcctatttgcgccagttactgatccctgaacaacagcgattgctgcaaacatttaccggcctgatcgccaatgcgctggaaagattacaactctcacgccgggcagaatccgccaaattggatacagaaagggaacagttacgtaactcgcttctggcggccctgtctcacgatttacgcacaccgctgaccgtcctattcggacaagcggaaatcctgatgttggatctctctgccgaaggttctccacataccaaacaggtgaatcagatccgccaacaaattctcagcacttcccgtctggttaataacttactggacatggcgcgtatccaatcgggaggcattcagctcaatctggaatggcaatcgctggaagagatcgtcggcagtaccttacgttcgctggaatatgcactcaaccgtcatcccgtcgcggtttccctgccatcggatttactgttgcattgtgatgccagtttactggagcgggtatttatcaacctgttggaaaacgcaattaaatataccgatgaacaaataccattaggtattaaagcgacaacagaaaaaaatcaaattcatattgaagtttgggatgcaggcaaaggcattccgccggaacaagaacagttaattttcgataaattctcccgcgctcgtaaagaatctgctattcccggcgtgggccttggattggcaatttgccgggcaattattgaaattcaccaaggaaagatttgggcgagcaataacgaaaaaggtggagcaagttttcactttgttctaccgttagagaaaccgccagaaattattactgaggagatgtgattattaccaacaataacaccatcttgattattgaagatgaaaaagagatccgacgctttgtccggctagcgttggaaggtgaaggctatcgcgtatttgacagtgatacactgaaatggggcctgattgaagcgggaacccgtaagcctgacttaattattcttgatttgggattgccggatggtgacggtattaacctaatccgcgatctgcgccaatggagcgcaattcccgttattgttctctctgcccgtgataaagaagcggataaagttgcggccttggatgtcggcgcagatgattatctgagtaaaccctttggcatcagtgagctattggcaagagtccgggttgccttacgtcgttttgccagaaccaacagagaagaatcgatcgttcatttttctgatgtggttgtcgatctggttaaccgccgaatcactaaaaacgatgaagaactgcatctcaccccgattgaattccggttactcggtgaattattagcgaatagcggtaaagtactcacccaacgccaattactcaaccaagtttggggccctaattatgttgaacacaaccattatttacggatttatatggggcatttacgacaaaaattagaaaccgacccaaccagaccaaaacatttattgactgaaaccggcattggttatcggtttatgccttaacttgcccccgccgctaagtcacaagattctagttgcagcaacttgagtttgaaatatcgcaaacctgcatttatgtattgcgtttttcggtgcatattagctgctatttactggtgctcaaactcacaataacgacaacatttgaacaaatatatagatcgcgaggtgggaatattttaaattaataaaggggaaataaattcccccaaagataacgctgttttcagcgatttccaaatggctaaaactcacctattcatatttttcatttccacccagcgctatagataagataatgaacattatcatcctcagtagcgttagctctctcacctctttcatctaagacatcgttatatccataaggaagtatcatgctggaaccacaactgctgcataacaattgaatgtcctttatcgccttctcggcggaatatttcgctggtaagtaacacaaatataaatattgattgggtgagatataaatatcttgagggattttaacccaatctccctccggacttttatctcttacagtgatgaactttaattcagtgatacaatccttattatcgatattgggatcatattttgctttatgcataaaaagacaaatattacccttactattcagattttcgtctttagtggattttaatccaatatacccttcaggaggggtgttagtattattgattccaataataatctcatcaatataatccgcatgcacacgtcgtttagcagactccgccggagcccagacagtttcaaaatgctttttaagcttggccttttgtgttctgtctgaacacagttcccaaatccccgtcaaggggttggaatctgcaaagttaactaattcaggggcattgggcacactggctttccagtcttcaaaggcttttttcgctgcggctatttcttctgcggaaggttgatctgcacttgtagcgccaccaaaaggatcaaatcgagataagtcaccgccaatggcgtgggtttttatattggatgctgaacgaaatttctttatatcctccataaatgaatttcctgtacgagcagagagaccgataaatcccgcaaatgaggctgcggcaaccacatcaaaagagtttgttagattcgacgtatatttgttcgtagatgatgaatattgcgcacagccgcccatgaccacgccactcagaaagtgagaaccccaagtattaaataggtcattcatatcctcctcagtatccgccttatcaagggctgttttaacactctctttaagaaactcttttagtgcttctgctgaacttttaagtatatagagatcataagtatactgaatgcgggaaaacgcattttcaaaatccgtcagactatccgtatcaaaatcgactttcagtgaggcactaaagaataaatagttacctttaatgcggcttttactggaaatattgctttgatatgactcaatagattcgcctgatgcattggtatattttaaatccccgacactataacaatcgatataataggggacttttagggttttgccgagaatagtgaccttcttgaaattatcttcactggcattgatttttcgctcatcgaaaagcgaattcatacaacttcccacattacaatacttaccaaaaacatcataacttgtgccgatcatttcagcaccagctataacagtatcatcgaatagggacaattttcgaaaataatttcggtcacgtatttcgacatctctttcgctgttttcctgttctagtgattttcctgttttatcgttagacataatggaacctcatattgatagggaataaattgacaatagctatcgccgcattcttgatgagggttcagaatttcatacctataaaaaagaatagagtagaagtgagaaatatcaacaaagtgatcatgaaaataatggcatatgtatcctgaaatagatgccattcagctcatctaaaatatcaatcattgtcgatgagttcatacttttctatttaaattcatagagtaaaattagcatggcatttatttgttcgctattaccctattgaatattcataactattaacttgtaaataaaaacaatagaaataattttaaaaaacaactaatacacgggatatatgtttcagcgaacagagaacaagagatagagccagctcagctattggcaaagggcgccaagatttgaatcctaacgccccaagtttgcctagcacatattttcagataaataatgagccacagactcttcacaacaagaaccaataatatcggcatcaggaagagcttgttttaccctattatgcgccgttcccatgatgacccctttagctacggttgaaagcatttccacatcattcataccgtcaccaaatgcaatcgttttattcattgggataccaagaaaaccagcgagctgaattaaagcttgccccttcgaaacaccactccccattacctccagactccaagggaatgaaaaagcaatactgacattatcagaaaagagatcaattaaatggcgttctaatttaaccaatgcatcatgatttctactcttatgaatgaaaaaaactttttcaactgcatcacaaggcatttcatcaacacacttgaatgttggattaaaattatcattctggctaaaatcgctaaaattatgattcacttcattggttaaccattgagaaccacaatacatattgatcactaaatcattatctacctgagtttcttcaatcactctttttacgatgtgacttggcaaatgttgtctgatatccaagttcttacaagcactggttaatctggcaccattcgaagtaatcaaatgcacaggtatatcaaaatcaccaataatggaatttacatcagcatggtgcctgccggttgcaaatacaatttgctttcccatacttgataaatcagtaagcactttacgggtaaacttaccaattatatcttcttgaaggagaagcgttccatcgagatctgtggcaatgagattgtacatagggcgttccagtgttaaaggcaattatcatctaagctttattaagcaattcgagcgatgcctgcttggtaaatgtcatcctttcttccagactatgattatccttttcataataaattgtcgcctctgaatcaatctgaggtcttggtgttattttttccaatatcagcatcgtgtcaaggaataattgtctggcatagcgaatagcccgtgtataagtgtcaatgacctcttcaaattcaggataaatagaaaacgagatctgattcacaatcggcccagcatcaataccttcgttgatttcatggatcgtcacgccatgagattgatctccatttttcaaagcccaattaaccggtcttacacctcgatatttaggtaaataagacaaatggatatttaatattttcttacatgaattaatgaattttaaaggcaatatccgcttatgaaatacgacaaaacataaatcgcaagtgaaatcaccattttcatagccgggtagattttcaaccttattatcttcaataacagcaatattattttgataacagaaatcaattaacgtctgatcagtgcttacaggttcgaatttatctgccaccacgtgcgatattttatactctttatgatttaagaaatattgacaaatgaaaattgccaattctcctttaccacaaattaccactgttttgggattattcattcgcaaacctcgttaacttccttgaccacgctaatatcactaatattaattaacccctgcatcaccatacgcaatgaacctattaaaatttcattatcacttggtgttctgcaagaaatacgtaaatagagatcagagcctatatttcctttgccagaacactctttcacatacagaccatgaatatctaacagtaaccgtgatatcgtctttgcatcagaaacatgcaatttacagtaaacaaaattagaatctgtctcaaatgcggtaataccctcgattgagtttaattcttgttgtaattttaatgtatcactaatcactttttcacagcttaatttataactctctctatattgcggtaatcttaataaaaactcttcagcaaaaccattcatattccaaatgggtaacacagctcttattttaccaagtaattcctgatttgcggtggcaatatacccgatacgaataccaccaatgccaaaggttttactcatgctgcgaataacagataaattcttatagttatctaaatgcgttaacattgtgtcatcacgcattttagagaaatctaagaaagattcatcaacaattaagtcgatatttaatgccgacaattcgccagccaaatataacagactatcaataggcgtcaatttacctgtcggattatttggtgactcaatcaccaccacatttggcttttctgctttcgccaacgttaatagttcatcaatatttatttcaaaatctctgctctctttactatagctaaatattgttctgtctttaccaaagcaattagcatattcattaaatgatggtacagtaactaatactttgcctgtataaacatcaggaagccgtttaattatctcagcagcgccatttgaaatacataattgcgttctttctattccgataaattcagataaagcctgctcgactaaacgattcccgccaggataatttaataatatttcatcaaaatgattctttatttcatctttcaattttttaggtggaaagttgaaattgtaaattaagccaaagtcaataataggataacgccagtatccaccatgcctgttttgcacaagatctaatttattattacttgaaatgaaatcacaaatagccagatcataagtattatctacttcataccattgagaattatcaacaatacttgctttaaattcagccatattattcagtaaagagtgtttaaatatatcctcataatataaccccgtcgatccactatcaacgtaactttctagctctttagtaacatattcagcaaaattagcggtgcaaatattataaatatttaccgtcttatattgaccttcttcaacctgatagttgttatctttggtggaatttagcgcaacgatattatcattatcaacttttgcgtaagttccttccatattttggctaagaggagaaacaagtacattaagatctcccgcttttgacatgacaatttccaagcatttcttagtaaagaagatatcgccttcaagaatcagggtatcttgcttaatccaatttctggcgagatataaagaatagatattattcgtcgattcccacttatcgctattaacaaattcaatatgcaagttatatgcgttttgtttaatatgagccattaaaacatcgctcttataacccaccacaataataacttttttaataccgacagattcgatattcctcagcgcattatcgataaatgatatctgatttgtttctaccaaaggttttggtttatttgatgttctcgttgataatctactgcctcttccggcacagagaagtattactgttttcatatgcatagtcttaataaattattttatacccgttatctttcaagctgcctctttgttggctgcgctcgctcaccccggtcacatagttcgctatgctcccggggattcactcccttgccgtcgcgacgcatcttgaaatccatagggtataaatggctgttaaaaggttatttttattgttaaataggaattgacctaagatatagttcattaatgatataaaattgatattgaattaaatatcaattaaatacgatgtcatatataacatgctgatatacccaaaccccgtcaattcttccatgaaaactcgcctctccaccattttcaccccccgtcttgacacccgatcccagaccaaatgtgtgaaaattattaagtacttcacctgacgtcgatataggacttaatttttcattagttagcaaaccatatctatcacttttaaattcaagaggaatattatttttatcaataatttcgacaagttttgagtgatatcccgtacagtgaatcaataaatcatcacaattaatgagtttaataacttcatcatcagaaatttctgaaatattcaagatagaaatatttttatattttctttctttaagttcttgtgcaaaagcaaaagaatcatatcttaaacctgaatatctattaactcggttacttaaagggcaaatatcttcctgtgtaaaatcgtagtcgtaagattctgcgcttgaaggcgaatcaaaaaacaacttgaaatctttattcacaaaaacatttatttttcctgcaaattctaattgctcaataagtctaatcaaacaagaaactgaactgtgtgatgaacccaatattgatatactttttacatcacctttatttataacctcatcataaaaacctttaataaaatcaccagaggtaatattattgctattatgcaataatctggattcgtttggatttccacctatattaaacagtacttttcgcgcggatacaatataatcttcattatttttatgataagttatatcatagttaccctcttcattctgcttaatttttttcacttccgcttcagtcaaaatattaaaccgatcaccatatttgttttcctgaataaagcgggcaattctctccaaatattggccgacaaatctcaattcaacgggcttatctttattggcactaaaatgttcccattccgatgttgatcttatatattgactaagctcatcatcacaaccgtcaaatttctctaaaaatacactacctaaagagttcgcggtaattttatatttctttaatgaaccagaacccaccatctctgttttttctaaaatcagacaattttttatagcttcatcttttaataaatccgggattaatgaaatatttgcaggacctgcaccacacattaccacatcataaaactgcttattcattgacaaaccctaacatttttaacgaaatttgtgtttcaataacattcccggcaaactcatgacgagtctgtttataaccaagaggttgtttatctaaacccgccttaataacatcacgatgattaattgttttattctcattgcgggaataaaccaacagctccttctcataatcaaatgccagacaaggaatacaacttaattttagtgtcttggctaattccagtctatgatgaccatcaataaccacatgcgttgcttcatcaatccagattggttgagtccaaaaaccttcaagtttaactttctctattaactgctcaacacgaacaggacaatgtaattcagttggtctaagatttgagacttcttctaatattaatttcatgtttatcccttagtttaaacatccgacagaaaattaccaacatcaatacacttaatatcgctaataattgaaataacactccaccattaaataattggataacagtaccaccaaccaatggagatatagaaaaaccgatactatagagtgacgctgcaccaaaatatgcgccacgtaaatcatttggtgccaaacgatcaataaaaacattcacacatggaaacaaaatagtttgactgatactcatgataaaagcagccacataccacaataaataaacatcataatatttgaatgaaataaagaacataaattcagataaaatgagtaatacagaccctacgtttattttcgtttctaacgccattttttgcgttaatatggaaaacggtaactgcataacgacaatggttaccgcatgtaacataataagcgaagcaataaactcagcatacccattaaaccctaatgaagtaattaactgtggcaaagttgaatcaaaatggccaaaaataaacatcatgagaatattatttatgaccaacattaaaaacacccggtcatttaataaaaccttcatcgttcctttaaaatcatcattatttgttaattttatttttattttcttaccaaataaataaacagggatcataaaaattacataagatagtgaaacaatcagaaaagaaatagaattaatatccaggcttaattttacgcctaaataaggcccgactaccgcacccgcattaagaaataaataccttaagtacatggcattctctcttacctgcttttcctcgataatatcaccgataacggcttttattgggttattcaccagcgcccaggaaatattcgctaataaagtaccaataataaaaccagattgatgttcagataaccataatattaaatatgccaatgaagagataagacatccaatgatgattatcttagcccggccgactttatcagagaagtaacccgcataaaaacttaatattgatgaaatcgcaatggataaagagagaactaatccaatcatcgatgcagtaaaatgaaactttgtatatagtatgatggatataaaaggccataccatcattgatgttgatcttgttacaaaagtcccaagaaatagaccccatatacatgccggtatggatgtataattactaagagaaaaatttttcattgttattttcttatattatttatattggtatcttttaaaccaagcatttaaaatatttatgcgagtacataagatccacctgccgctacaaaaatcaaatgtagaagcaagaactaggatgatctgtacgataaagcaaattcaatgatatataatttatttttaatatattatcaaaacagatgttaattgcaaacgaaatatgacatttttattacatgttaaacgtaggtcaaatgctggtgatgttagtaagcaacataatgacataagtacttcgcactttaaccggtaaaaacaccggtaaaaagggctcttaatctcagataaaaacctttccgttcaatctttatctattcaaataatcatcaattaactgaaaaactcagcttaatttaatcccaaaataaactgtaatattatgttcaaagtgaaacatataaataaaactgtattttagtttaatagctaaactccggtggggataattattatttatagatttatatgaagtatccgagattaaaactggaaactatctcacgggcccaaaatattcactaactaaaatggggattagtaatgagtttattctttaatttatttaatgaaggtaatataccctatagatttcaagatgcatcgcggcggcaagggagtgaatccccgggagcatagcaaactatgtaaccggggtgagcgagtgcagccaacaaagaggcaacttgaaagatgacgggtatataggatttattcgcgatgagtacctggcttatctatgccttattatcagcgtttactgccgctttagtcgctatcttcgggaaaatcgggttgcaaaatcttgatgccaatacagcaacagcaatacgcgcagtcattatggcgttgtttcttgtcggcgttgttgtcgtacagggaaagttaaatctggtgagtgaaatagtggcaaaccgcaaggcattgctttttatcgttttaagcggtgtggcgggggcattgtcatggctgttttactttctagcaattaaaaacggtcatgtttctcaggttgccccaattgataaactcagtgtcgtgtttgccgtcatcttcgccgttatcttatttggtgaaaaaatatcactgatggccgcaggtggtgttgcactgattactgccggtgcattaatggttgctctgggctgaaaaataaaaaatccgcaaaagccgttaccactgttgcggattctttttaatcggccaaaaagatcaaccggcggcaaaaacctggttaacaatatccagtgcttcctgctcaattttctgccgatgctcagggccaagcaggctttcacaataaattttgtaggcttcttctgtccccgatgggcgagcagcaaaccagccgttttctgttatcacttttagaccgcctattgacgcgccgttacccgaagcttttgtcaaccgggcggtgattggatcaccggcaagcttatccgctttcaccatttctggtgacaacttggctaataatgctttctgctgataagttgccggtgcctgaatgcggctatagcttggcgtaccgaagcgagctgccaacttattataatgctgctgcggattttcccctgttactgcggtcatttctgccgccagcaaacacaagataatcccatctttatctgtagaccacggcgtaccatcaaaacgcaggaaagaagcccccgcactctcctctccgccaaagcccaattcacctttatgtaacccatcaacaaaccatttaaaacctacgggtacttccaccaatttacggccaagatcggcgacaacccgatcaatcatggcactagataccaatgtcttacctatcgcaacactttctgaccattgcggacgatggcggaataggtaatttatcgcggttgccagatagtggttaggattcatcaaaccggcaggggtgacaataccgtggcggtcataatcaggatcgtttgcaaaagccagatcaaacttatcgcgcatggctaacaaacccgccattgcccaaggggatgagcaatccatacgaatgacgccatcatgatccaagtgcataaaacggaatgtctgatcaacttgatcattaaccagcgtcagatccaaattataacgctcaccgatacgctgccagaacgcaatgccagaaccccccaaaggatcaataccgattttcaacccggcccgctggatagcagccatatcaaccacatcacccaacgcgctaacatacggttcaactaaatcctgctgatgcaaatattcactgttcaatacttgaacaaatggcaaacgtttaatgcctttcagacctgccgtgagcaactcgttggcacgacgttctataattgctgtcaaatcggtatctgcgggaccaccatcaggtggattatatttaatccccccatcttcaggaggattatgggaaggggtaataacaattccatcagctaatgctttccccaagcggttataacagaggatggcatgagaaatcgcaggtgttggcgtaaatccattattttcctgcacaatcacattcacgctgttagccgttaagacttccaatacggaaataaatgccgcttctgataaagcatgggtatctttacccacataacaagggccattgattccccgttgcttgcgaacttccgcaacagcctgagtaattgccagaatatgcgcctcattaaaactgtgacgctgagaactgccacgatgaccggatgtaccaaatttaaccttatgctctgagttttccggctgaggatgcaaggtgtaatactgtgatgtaagctgcgctacatttatcagatcactttggcgggcaatctgccccgcgcgcggatgatttaccactttaaatctcccctggacaagagctgcactgaactttatccgtcagcacagccttaatcagttaaattgtgccacacaccttgtcgataaaattggctgagaatttcatgtcctgcataatttgctcaaccatattacgcttacgatcagtattggtgttagtaatgacccaaaaaggtgtgcccggaatgtggcgaggtttagtttgtttaccactggcgagcaatgtctgtccatcaccagcaaaataaacacgggtacgaccatgcatggtatcagtcgtctgggaaaaactttcactgttcaggctgtataacgtagataagatcaacataaaacgctcaacagattttttcttatcagaatagtcatctgaaagtaacaattcacgtatcacacggacagaatcacgctggcgggctaccggcgctttctccacagcactgagaggctgcacattttgtactggctgctcggcgttaaatttcaacattcgccgtaaaatatcagatgcactttcaccaatatgttgtgtgtggctggcaatatagcggtaaaggtcttcatcaacttctatcgttttcatttctatccagtactgttctaaataaaaaattttcaccgattataaagtataaaaagagaaaacaaaacaattaaaatttcaataacttaaaagtatttaaacatgaaaaacagcataataaaatatccgcttttcatctaaaataaatcaatcagttacataaatattgtgaatataaatttcatggtcgaatgtcatatcaatcttttaataccacctactttaggcgttgataatcacataataatttattctgatattatacccagataatgataaacttgattgcaatattgccgataataaattcaatcaagggagatgagactgtgaatggggagattgattataaacagtaaaacagtttaaattcatagagatgtatgtttattaccattaaatcttaatagtaaatatgttttaataaatttgtaaatttttatttgaatataacatttaaattttaccaaaataaatcgtaaccatataagttatatgaaaaaatcatcatatccattattatattttcaatgtgaattatagaatcaataatttcaatcattaatcgttaaaatcataatatctattctttaaatttattcttataaatccaaaacaatattattaaaccaagatttaatataaataaaatcataaacactcaaaaataaaatggattttcatgattttcaatattaagatacagttgcaatattgatatttaaaaaattccagtcagatatacacaatcattaattttgaaatgtatatatctgaccttgtaatttaatcaataagtgaaagctgttgccgtaaataggtacctgaacctaataatcctggttgtggatgagtaatcaaataaacaggaatctgttgtactaacggtttaaagcgccctttatcttcaaatccatgaagaaagttcgattgcctaaagaaatcaagaaaccgcggcactataccaccagcgatatacacaccaccaaaagtccccatatttaacgctaaatttccgccaaatcgccccataatttcacaaaatagtgtcagagcacgatggcaatattggcaacttttatccaatgctcgttgcgtcacggtttctggttctaaatcttccggctgacgatgatccaaaatggcaatggcctgataaaggtttaccaatccactaccggacaagattctttctactgaaacatgcccaaatttacgccgtaaaacagccaatattgcatcttgttcttcactattcgcggcaaaatctacatgaccaccttcacccggtaagcttacccattgcttgtctaccttgatcaaatgagcgacaccgaggccagtccctgccccgtaaaccgctatcggtttgtctttaaccgcttctcctcctcctaattgaagcttgtattcttctgtcagcattggaatagccatagatacagccgtgaagtcattgatcacatctaatttttctagcccaagtgtccgtttcagctcactaatagaaaatgcccattggtgattggtcatttctacccaatcaccgtttatcgggcaagcaatagcaatacatgcataagtcactactgttttttgctctgctaaatagtgactgataatagattctaatccggcgtgttgttttgcactatatgtttcgatccgctcaataaccccattttccaaattgcaaagtgctaatctggcattagtgccgccaatatcagcaacaagtccgtagagattcatttttatatcctaataatcagctagtacaaccattaggtaaagcttatcccatctggcattattggtatagatcgtttaggagtgaataacctgcactcaccccggtcatatagttatctatgctcccggggattcgcttccttaccgtcgcgatgcatcttgaaatctttagggtatatatgggccagcgctcacacgctgttgtctcgcttttatgcggattttgtcttctgagatggtgagtcgtgcgggatgactcggcctacggccttatccttcaagtcagcactatcagaaacacggcttgtaaatctgatggaccggaaaagaaatattattctgttatttaacaaaaaaacatattttcccacaatttatgatgatctttcatcatgataataccgtcaatttagtatgagcccctcatgttgatatttcgtactttagggggtagactaactacgttagttgaagagtaacgcgctaaaaccgaggctaccaacctggtgaatagcattaaagataaatcaccctacttaagggtaaatgcaaaaaaaccaacctcaccagttggtttttttgtttttatctattcacgttctaatccattgaatcaggacaaaataaacttataatcaacggctgttagtttagagatagtgttctgaccgtgtatctactacgcaagttttcttaagccctggctgaagtacaggtggtgctgattcagtgcctcagtcagagcgcgttactcttcaactaacactgatgagaacccagccagacaggcagtgtaaaggcaatggctgggtaaatcgcgctccctaacaggagcaaaacggatgaaagcattcaaagcctttattgatactgctatcatcgttctcaaagcattagttgcgcttttagaattgatccgcgcatttctgaaatagataacggaaacgtagctaaggtcatcggattaaccatccgatggcctttaatattcatatcgggccagcgctcacgcgccgttgtctcgcttcgctcggctcgaacctgcgacccattgattaaaaatcaactgctctaccgactgagctaacgacccatctataagggaactactctgaatatcttttggagtggtgggtcgtacaggatgactcggccttcgaggttttcttcacttcgttcggtgactactggtttcgtttggcaggctttgttaaataaccggatctgtagtacgactaaaggtatggaataaatttgtaagtcatgctggcaattttagaattataagagtaccttgtactctaggataaaggaggttttccagtgagtcatgcgatagagtttatcgaaactagtatgtttacccgacagataaaagagattgccactgatgatgaacttaaagaactgcaacgagagcttatcgagtcaccagataaaggtgatctaatacgtggtactgggggttacgtaaaatcagaatggctataggctcacaaggaaaaaatggtagtgccagagttatttatcttctagcgactgaagatattatctatctggtgatggcttatccgaaaagtaaaaaagatagcttaacggatgccgagaaagcagaactgaaaaaactaacaaaattactaaaagatgaggtgtaatatgagtttttttgacgaattaaaagcatccctagaagaagcagttgaaattaaacaaggtaataaagccgcagcgcgtgtaacccgatacgaagttaccgacgttaaagctatccgtgctcaacttaacatttcacagacagagatggcggaggctttaggcactagccttgatacaattaaaagctgggagcagaagcgtcgaaatccgacaggactagcggcaaaggtgttagctatcatccaagaaaaccctagtttctataaagccctggcgacgcattgattagccggtgtgtcgtacaagtattaaagttacctaccacatctcggttctacctgtttccaagaggccatagtttgagtgttctcattgtttgtgacttcttttgctgcgggccagcgctcacgcgctgttgtctcgcttcgctcggctcgaacctgcgaccaattgattaaaagccaactgttcttactctaccggctgagctaacgacccatctatagggggaactattctggatatcttttggagtggtgggtcgtgcaggattcgaacctgcgaccaattgattaaaagtcaactgctctaccgactgagctaacgacccatctataggagaactactctgaatatcttttggagtggtgggtcgtgcaggattcgaacctgcgaccaattgattaaaagtcaactgctctaccgactgagctaacgacccgcaccaaagatatgtgataccgcctgaaacaatcttaatgaagtggtgggcgataccagattcgaactgatgaccccctccttgtaagggagatgctctaccaactgagctaatcgcccacttcatgatgactattactgcttctataccactgaatttatgattggtgggcgataccagattcgaactgatgaccccctccttgtaagggagatgctctaccaactgagctaatcgcccaatcataaaatcattcttatcacaacgagatggtgggcgataccagattcgaactgatgaccccctccttgtaagggagatgctctaccaactgagctaatcgccccgtcgtgatggagtcgcattatagggatagttcagagtgagtcaacgctttttctagagaaaaatatcgttcgtctcaaaattaaacaagggtgagataattatcgtcactatagggtgcagtttagacaaatacactgactttcctcaataacttcccgttaacagcattgaggaattaaggtgcagtgataaaatgacccccacttttattactttaaatcaccaataacgttcattgaaaagtgaaacgtaattaaggcaatccccgatgagtaaaattaaaacccgtttcgcaccaagcccaactggctatctccatgttggtggtgctcgtaccgcactttattcctggctgtatagccgccataacaaaggcgaatttgtattgcgtatcgaagatactgaccttgaacgctcaactcaggaagctatcaatgccattatggacggtatgaactggttaaatctgaattgggatgaaggcccttattatcagacgaaacgttttgatcgttataatcaggcaattgatcaaatgctagaacaaggcaatgcctatcgctgctattgttctaaagaacatctggaagcgttgcgggaaactcaaatggcaaatggcgagaaaccgcgttatgacggccgttgccgtgataatccatgtcaacatgacccagctcaaccccatgttgtccgtttccgcaatccacaggaaggttctgttatttttaatgatcagatccgaggcccaattgagttcagcaatcaggaacttgatgatctgattatccgtcgtaccgatggctcgccaacgtataatttctgtgttgttatcgatgactgggatatggagatcacccatgtcatccgcggtgaagaccatatcaataatacacctcgccaaatcaatattctgaaagcactcggcgctcccgtgccagaatatgcacacgtttcgatgatcctcggtgatgacggtaaaaaattatccaaacgtcacggtgcagtgagcgttatgcaataccgtgatgatggctacctgccagaagcactgctgaattatttggtgcgtttgggttggtcgcacggtgatcaagaaattttcagcattgaagaaatgactgagctgttcagcctggatgctatcaataaatccgccagcgcattcaatacagaaaaactgcaatggctgaatcatcactatattaataccctgcctccagagaaagttgccgttcatctagcatggcatattgagcaacaaggtattgattcccgtaatggcccacagttggttgatctaattaaattactgggcgaacgctgtaagacgctgaaagagatggcggaatcctgccgctacttctatgaagattttgctgaatttgatgccgatgcggcgaagaaacatttgcgcccagttgcccgtcaacctcttgaagttgtccatgcaaagctggcttcaattactgattggacaccagaaaatgtgcatcatgccattcaatccaccgctgatgagctagaagtcggtatgggtaaagtgggtatgccattgcgtgttgcggctaccggtgcgggtcaatccccaggtgtggatgtcactattcacgctatcgggcaaccccgtactctctcccgtattaatcaagcgctagagttcattgctcaacgtgaaactcaatcttaattaatgcacccaaggcatcacttatcacattgtgatgcctttttgttctcagaaaatctcatttaattgctccctttttatcactttatcaaacactctctataccctatggatttcaagatgcatcgcgacggcaagggagcgaatccccgggagcatggataacgatgtgaccggggtgagtgagtgcagccaacaaagaggcaacttgaaagatgaccggtatatttcacttcaacccattgctcagcctctattttgttaattgatcataaaattgatggctttttcaacgcttgttgtgagaatgatgagttagccgttgacagtatttgcagggtttcatattatgcgccccgttccattaattttgattggggctatagctcagctgggagagcgcttgcatggcatgcaagaggtcagcggttcgatcccgcttagctccaccaaatcctttatattgaaataaggtatttggtcctaaattaggaaataccacactcgtggggctatagctcagctgggagagcgcttgcatggcatgcaagaggtcagcggttcgatcccgcttagctccaccaaaattatcaggccctgaaagccatgctttcagggcattttggtcattaccctatctaaccaccattatcggttgaaaaaacgccaaccttggctagccttttttcaatggcttcaccaacgaatctagtccctctagttttattgctaaagtcatttccatcagcgcacccaatttaccttgtggaaattcacccttacgagcgaaccacaataaatactcttccggtaagtcaatgagcatacgccctttgtatttaccgaacggcattgcagtattagcaatttctatcaggttctctttttccataatttgcacatcgataaggagaaataggtgaaagggaatctgcaccatccatgatgcaatattccacgataaaacgttatcttttacagtaacaaacctgcaatagccgcagacaagaaactgacaagcgttgaaccaaacagtagtttcaaaccaaagcgggaaacgacattaccctgtttctcattcaagcctttaatcgcccctgccacaatcccaatggaagagaagttagcaaaagaaaccaagaataccgacaaaatgccctgtgaacgaggagaaagttctgtcacaattgattgtaagctgtgcatcgccacaaattcgttagcaaccaatttagttgccatgatgctaccaaccttcgatgcttcatctgtgggaatcccaatcacccaagcaaatggataaaatacgtagccgagcatttcctgaaagctcttctcaaacaccatgctgaacaacgcattaaccgccgcaatcagggcaatgaaaccaatcaacatagcagcgacaatgagggccactttgaaacctgccaaaatatattcacctagcatttcgaaaaagctttgaccttcgtgaagattgctcatctgaatatcttcttcactgtcaacagcatacggattaatcaatgataggatgataaaggtactgaacatattaagcaccaatgccgctacaacatatttaggcgctaaaattgtcatgtaagcaccaacgattgacatagaaaccgttgacattgcagtcgccgccatcgtatacatacgacgctctgacatttttcccagtacatctttataagcaataaagttttcagactgcccaagtatcaaagaactgactgcgttaaatgattccagtttacccataccgttgactttggacagcagagtaccaataacccggatgatgattggcaatagcttgatatgctgcaaaataccaatcagcgcagaaataaagataatcggacacaatacattcagaaagaagaatgccagttttgcatccatcatgccgccaaaaatgaattcagtcccttcacccgcatatttcagtaaatgctcaaacaaaccagcaaatcccatgacaaattcctgaccaataccagaattcaggaaaaaccaagccaagataagttcaataacaagcaattgaataacatagcgaggacgaatacttttacggtcactactcgccaaaatagcaaggccgccaatgacaatcaaagctaaaaagaaatgcaggatttgagacatatcacactccaaacacgatagaaagcgagtttttatcaacgcattctatgtaataaaaggcgagcaaaaaagtatatacccgttatctttcaagttgcctctttgttggcggcactctctcaccccggtcacatcgttatctatgctctcggggattcactcccttgccgtcgcgatccatcttgaaatccatagagtatagatatcacattagactgaaataattcttgctgtaaacctttacttaatgagtctgaccacatttttagctgaatcgtataaaataaactttaaaaacaccttatcgcacataactgattattgagaaaagctctcaataatcagcatgtaaacaaaaagttattcacccaataaacggatcatttcttcttcatcaataaccggaatatttaactcattcgctttagctaattttgaaccagcggcttcacccgcaatcactaaatctgttttcttagaaacgctgcccgtcacctttgccccaagtgcaacaagtttagctttggcttcatcccgggataactgatgcaaggagcctgtcagtacaactgttttacccgaaaatgggctatcaatcttctcagctctcgttacgacgaccggttcccagttgataccaatatcatcaatcagatcgtcaataactgtttggttatgaggttcaatgaagaagttaacaacatgtttcgccaccacttcgccaacatcctgaacctctttcaatgcttcctcatcagcagaacgtaatttatccagttcgccaaagtgagcagccagattagcagcggtcgcttccccaacttcacggatacccaatgcataaagaaaacgggcaaaggtggttttttttgctttttccaacgcatctactacattctgggcagatttcggccccatgcgatcaagcccggtcaatttacctgccgtcagcctgaaaagatctgccggggttttgacatactctttatccactagctgatcgataatcttttctcccatgccgtcaacatccatcgcccgacgggaaacaaaatgcctaagcgcttctttacgctgagcaccacacaccaatccccccgtacaacgcgcgacagcttccccttcaatcctttcaatatctgccccacataccgggcaatgttcagggaaaacaactacattactgtcctgtggccttctctcttccaaaacaccgacaacttgtggaatcacatcaccggcacggcggataataaccgtatcgccaatccgcaaacctaaacgttcaatctcatccgcattgtgcaatgttgcattactgacaatgacaccagagacctgtactggctccagacgtgctaccggtgtgattgcaccagtacgaccaacctgaaactcaacatcacgaacaatcgtcatttgctcctgagcaggaaatttgaatgctgtggcccaacgtggcgcccgggcaacaaagcccaatatttcctgcaattccagcgaattgattttgacaacaacaccatcgatatcaaaccccaatgcggaacgctggtttacaatatcatgataaaaatcaataacctgttgactatcggtacaaactttaactttatcgctgaccggcaatccccatttcttaaactgtatcaatcgttcgtaatgactggcgggtaactctcccccctccaatataccaacaccataacagaagaaagccaatggacgtttagccgtaatacggggatcgagctgacgtaaagagccagccgccgcattacgtgggttagcaaatacttttgcacccgtgcggcgagcttcctcattcagtttctcaaaccctttttgcggcatgaaaacttcaccgcgaatttcaatacgagctggaatattttcgccgaatagacgcagtggaattgcgccgatagtccgtatatttgatgtaatattttcccctgttgtaccatcaccacgagttgcagcccgtaccaattcaccattttcatacaacaggctgaccgccaaaccatccagtttcagctcacagcacaccactaaatcctgggtctctttcaggcggtcacgcacccgcttatcaaacgccagataactctcttcatcaaatacgttatccaatgacaacataggaatttcatggcggacctgttcaaaagccgccagaggagcagcgccaatccgctgcgttggtgaatccgatgtaatcaactcagggtattgttcttcaagatcctgcaattcctgcattaaccgatcatattctgcatcagggatttctggtgcatccatgacgtgatacagatattcatgatgacgcagtgttgttctgagcttttctatttgttgagcagttgatttcatgatttataaccagcgataaaaagcccccgactggcgggggcttgaacattcgataaattgattatacctgaacaccaagtgtgctgcgaatacgtgccttatacaattcgattttttgcggtgtcagcatttttcgctcatcatcaagcaccacacccccaacatcagaagcaatacgctgggccgcctgcaacatcagtttaaaattctgactagattctccgtaagaagggaccatcataaatatggaaacccctggagtcgtaaaatcaaccattgtttcaggattaaatgaacccggtttcaccatatttgccaaactaaacaggaccgggccgctacctgatgggttcacgtgacgatgaaaaatctgcatttccccaaactggaagccagattgtagaatactttgcagcaaggactcaccattcaattcctggccgtggtgtgctgctacgtgaagaaccaaaacaatttctttcactttggtctgagcttctttttcgccagccgcctcctgagatttttcttcaatcgcagatccgtttctttcagactcattctgctcttcaaattcaaacagaccgagttggggttcctgctcttctatagctgcccttctcgctgtcgtttcaggctgacggcccgtcagcaacggatcatcgctttcttcaggcgttgcagcatcaatttcagtcaatttttgctgacgacgctcgatagctggctcagctttatactcctgatgagatttcacctgcttatgggcataaggcttttgctgattgtcgaacgcttcatcatcactgtcatcgacgaaactattctgacgatcatgtttatgacgtttaactgggcgatcacgaaaaagcgaagaacgctctttacggctggtccacaacccatgtaacagcaaagctattattgctatcgcaccaacaatgattaatatcagacgcaaatcctgcatcattgctatctctgttgtttaattaagtatgccaccacggcggaatattttctgtattaactgtatttgtcaaataacacaagtgcaagcttatacacacttttcttatcagaaaaatgcctaataagcctcttttgcattttttttatacagaacaatactagtcagtcgaaaatcctgcctatatgatagcgtttcaatcacacaggagagaataggaagtatgctgaatttgacaaaatcgccaaaaaatttgagcggctttcagtatttggtgcaaggttgcaaattaattactcgcccaggcattaaaagatttgtcttattgcctttgttggcaaatgttttgtttctcggtggctcattttggtggctctaccaaaaactggagaattggctcccttggatagtgagcaaagtaccagattggatgcaatggctcagttatattttatggccgctggccgtgatctctgttttgctgatttttacttacttcttcagcacaatagcgaattttatcgcagcgccattcaatggcttgctggcagagaaactggaagcggatttaacaggaatccccgcaccggataccggcgttatcgcactcttcaaagatgttccacgtatcctgaaacgggaattagtcaagctgcgctactatattccacgcgctctgatcttgttgctactctattttattcctgttatcggccagactgccgcacctgtgctctggtttattttcagtgcatggatgttatcgattcagtattgtgattacccctttgataaccataaagtcagttttccaacaatgcgtagtgcccttcgccaaaacaaaataattaatctgcaatttggcgcaacagtgaatattttaaccatgatacccattgtcaatttggtcattatgcctattgccgtatgcgcagcgacggcaatgtgggtcgatcgctatcgagatcaacacgctcctcgtattatgccgtgatattcatttaaggtatccttttagacaataaaaatatatttaagttatatttccattaaccggttgttggcgtattgttgatcggatatcactaaagggagttgaaagacgagtatgaataaaatttacgaagataattctttgactattggtcgtaccccgttaattcgcctaaaacactttggcaatgggcgtattctggcaaaagtagaatcccgtaacccaagttttagtgtaaaatgtcgcattggttccaacatgatttgggatgctgaaaaacacggtatcctacaacccgggaaagagttggtagaacctaccagcggtaataccgggatagcccttgcttatgttgccgccgctcggggctacaaattaacgctgactatgccagaaaccatgagtattgagcgccgcaagctattgaaagcattgggagcgcaactggtgctgacggaaggcgctaaaggtatgaagggtgccattgagaaagctaacgagattaaagctagcgatcccgatcgttatattatcctgcaacagtttagcaatccggcaaacccggaaatccatgaaaaaaccacaggcccggaaatctgggaagacacagacggtgaagtagatgtatttgttaccggtgtagggactggcggtacattaacaggggttgcccgttacctgaaaaacaccaaaggtaaaaatatcaccacggttgctgtagagccggaagaatcacccgtcatcagccagactctggccggtgaagaagtgaaaccgggtccccataagattcaaggtattggtgcaggtttcattccagataaccttgatttgacactggttgatcgcgttttcaaaatcagcagtgaggaagctatcaaaaccgcacgtgaaatcatggtaaaagagggcattctggcaggtatctcctctggagccgccgttgcagcagcggtgaaactttctcaggaaccagaatataaagataaaaatatcgtcgtcattctggcttcatcaggtgaacgttatctaagcagtgtactgtttgctgacttgtctgatgaataaaagtttttaagtaagttacttagatttattgataaaaaagcacctgaatggtgctttttctgtgtggtagatcaaacttttacactttgccagatgatttcttacaatgggtctagtatttaaccaataataattatttcgatgctcgaaattaattagcagaagtagtagtttcagttaagtagttccgcgatctatctttacttcaaactatcaatcagaagcatcggaaagaacaatttttctgataatgaataaaaatttttattacattatcaacctgagagcctatctcagtagacgtcgttagtgctgttcattcttaaccagtaaaagtgaatacagacagcacacatgacccggaacttacgggccgtactaaagaacgttcaagagctatttatcgcttttgccagaacattactcagttcgctctttaggtaaataaaatcgtcttaaatgggataggcagtgaataaacactcaagttaaaatttgtccatgacaagttcttaacttacatagcaaaaatctaagttattgaggaaacgttatgttccagcaagaagtcactattactgcaccaaatggcctacacacccgtcccgctgcacagtttgttaaagaagccaaaagtttcgcctccgacattactctgacttccggtggtaaaactgccagtgccaaaagcctatttaagctacaaactttgggactcactcaaggcactgtagtgaccatttctgctgaaggtgaagatgagcaaaaagcaatcgagcatctggttaagttgatggcagaactggaataactttccattaaccgtaaagccagtcaagatttagagattgtgaatagacaggtattcacttagccgttcctcatccccggataaacttttatctggggatatcagtttaaatgcatgccctaaaacagcagaccatctgtgggctggctctttaaagaataattattagtagttaggtaacatcatgatttcaggcatattagtatcaccaggcattgctttcggtaaagcactattactgaaagaagactcaatcattatcaatcagaaaaaaattagccaagagcaaatcgaacaagaaatttcctatttcaagcaaggtcgtgaaaaagcctcatctcagctagaaatcatcaagaacatagcagcaaaaaacctcggagaagaaaaagctgaaatcttcgaagggcatatcatgctattggaagatgaagaacttgagcaagaaattattgcgttaatcaaaaacgatttaaaaacctcagatgccgcggtttattctgttattgaaacccaggcccaagcccttgaagaattagatgatgaatacctgaaagaacgtgccacagacgtgcgtgatatcgggaaacgcttgctgaaaaacattctcggtatacccattgttgatcttggctccatttcagaagaagtcattctggttgccaacgatttgactccatctgaaaccgcacaactcaatctggaaaaagtactcggctttattaccgatttaggtggccgaacttcccacacgtcaatcatggcccgctctcttgaactgccagcgatcgtgggtaccactcaagcgacgacgacaatccagaatggtgattacctaattctggacgcagtaaataaccatatttacatcaacccgtctgatgcagaaattgaacagcttaaaaagaccaaaaacgaatatctgtcagaaaaagctgaacttgcaaagttgaaagatctcccggcaatgactcttgatggtcatcaagttgaagtctgtgccaatatcggtaccgtccgtgatgtgatcggcgctgaacgtaatggtgccgaaggtgtcggtttataccgtacagaatttctgtttatggatcgtgatgcactgccaacagaagaagaacaattccaagcttataaagccgtggccgaagcaataggcagccaagcggttattatacgtacgatggatatcggtggtgataaaaatctgccctatatgaatctaccgaaagaagagaatccattccttggttggcgtgcaattcgtatttgccttgatcgaaaagagatcttacattctcagttacgtgctatcttacgtgcatctgctttcggtaaattacgtattatgtttccaatgattatttctgtagaagaagtacaagagctgaaagtagaacttgaattgctgaaaggccagcttcgcgaagaaggtaaaaaattcgatgaagcaatcgaagtgggagtgatgatagaaacaccagcttcagcagttattgctcatcacctggcaaaagaagttgactttttcagtattgggacaaacgatctaactcagtatactctagctgtagaccgcggtaacgagttgatttctcatctttataacccgatgctaccagcagtattgagcctgattaagcaaaccatcgatgcttcacacgctgaaggtaaatggacggggatgtgtggcgagcttgcaggtgatgaacgtgctaccttgttgctattaggcatggggctggatgagtttagtatgagtgcgatttctattccccgcatcaagaaaatcattcgtaatacgcgttacgaagatgcaaaagcgctagctgagcaagccctttctcagtctaccgctaaggggttgatagcattggttgataccttcatcaaagaaaaaacactttgctaacaatatcggttaaaacgcggtccagtataaacaattaggagaagattcatgggtctgtttgataaactgaaatctctagtttcagatgataaaaaaaacagcggcactattgaaattatcgcacctttatctggtgagattgtcaatattgaagatgttccagatgttgtcttcgccgagaaaattgtcggcgacggtatcgctataaaacctgccggcaacaagatagttgcaccagttgatggaaccatcggcaaaatatttgaaaccaaccatgcattttctatcgaatcggacagcggtattgagctatttgtccattttggtattgatacggttgagcttaaaggtgaaggctttaaacgtattgctgaagaaggtcagcgtgtacaaaaaggtgatttagttttggaattcgatcttaaattccttgaagagagagcaaaatcgaccctgacacctgttgttatttccaacatggatgaaattaaagagttatccaagttgagtggttctgtcactgttggtgaaacacccattatgcgtattaaaaagtagcaacattttaactgttacaattccattttcatattaaaaaacggccgacaatcacggctgtttttttatcccttatattcaattaatatcgttttctatttatacccgttatccttcaagttgcctctttgttggctgcactcactcaccccggtcacatagttgcctatgcttccggggattcactcccttgccgtcgcgatgcagtcttgaaatccatagggtataaatatataacctgattaattaaatactccggtagaaagatatctatcaccacgatcgcaaataatggtaacaataacagaacctggattttgtgctgcaatacttaatgctccagcaacagcaccgccggaactaactccacagaaaatcccttctttctgagctaataaacgcatggtatcttcagcttctttctgagtgatatccagcacttgatcaactagctccttgcggaaaatgccaggcaaataagccggcgaccaacggcgaataccgggaatatggctattctccgccggttgtaagccaataatctgtacacgattagactggctttttaaatagcggctaacaccggtaatggttcccgtcgttcccatactggaaacaaaatgtgtaatacgcccttgcgtctgctgccaaatttccggccctgtcgtcgtaaaatgcgctaaaggattatctgggttattgaattgatcaagaactttaccttcaccattacgctccatttgctgagctaaatcacgtgcaccttccatgcccattgctctactcactaaaatcagttctgcaccataagctcgcatagaagcctgacgctcaaggctcatattatcaggcatcagtaatttaaggtgataacctttcactgcggcaatcattgctaacgcaatacccgtatttccgctagtggcttcaattaatacgtcaccgggagaaatttcaccgcgcaattcagcttgctgaatcattgatagcgctgttctgtcctttatcgagcctgccggattattaccttcaagcttcacccatatttccccccctagcttatcggtgattcgttgtaattttaccagcggggtgttacctataaaatgttccaagcttgccacagctattacccaaattttatttaatagaaaagcgaaataaccatattcaggaatatatcgcaagactttaaataaaaaatgcccatccctgacggtaaggagatgagcaaaatggtaccaaccaaatctaaataattatcaggccgtttgggctaaacttagtgtttgcaattgtttatcacccgcatataaacgcgcctcagtgccaccaataaaataacgatttcctcttgtgggtactgaagtttcatcaaaccaaacaacagcaaccgattcatgatgccagcctaggggctgaaccgaaagctgccagaaatgccctctaggactgacctcggtcacctgtaccggcaatggactggaaagtgtcggttgcgagttcatcatgatatcccacggacgcaagaatacatcaacattcccctgatggattggcgtcacattgagaggcaagtgctgtccgccaatcaacaactgagagcctttaatttctccactaaaatgattgacctcacccaagaactccatcacaaaacggcttgccggataacgccatacctcttgtggcgtacctacctgttcaatattcccttgtctcataacaacaacccggtcagccacttccatcgcttcttcctgatcgtgagtgacaaagacgctggtaaatttaagctcttcatggagctggcgtagccaacggcgtaactccattcttacctgagcatccagtgcaccaaatggctcatcgagtaatagaatttgtggttcaacagccaatgctcttgccaacgccacccgctgtttttgtccaccagaaagttgcgatggataacgttcagcaaaatgcgtcaattgcaccatttccagcaactccatcaccttacggcggatagccgccatattcggacgcctacgtcgtggcagtactgtcaatccaaaagcaacattatcaaacacggtcatatgccgaaacagtgcataatgctgaaatacgaatccaacttgccgatctttagcatgcatacggctaacatcttgcccatggaaactcaacttccccgcggtttgttgttccagaccagcaataatcctcaacaaggttgttttaccggagcctgacggaccaagcagagcaaccatttctccagaaaaaacattcagagtgatatcgctcagaacctgagtccgaccaaaatatttactaatattgttaatttcaatactcatattctgctcctaccttaaccatgttggcgacttaaccgccactgcaaagcacttttaacaatcaaagtgataattgccatcaatgctaacaatgccgccgcagtaaatgcccctacggtgttgtaatcttgatgcagtaattcaacctgcaacggcaatgtgtaagtttcaccacgaatagcaccggataccactgagacagcaccaaattcaccaattgcccgggcattggtcaaaaccacgccatataacaacgcccaacggatattaggtaatgtcacccgccaaaacattttccaaccagatgcccccaataaaattgcagcttcatcctcctgactcccctgactaagcatcatcggcaccagctctcgaacaacgaaaggacaagtcacaaatatcgttactaaggccatccccggccaagaaaacatcaattggatatcatagggttccagcaaacttccggcccagccattcgaaccataaaacaataggtagatcaaaccagctacgaccggcgaaacagcaaacggaatgtcgattaatgtcaataaacattgccgccctggaaactgaaagcgcgttaccagccaagcaatcatgacgccaaaaattaggtttaccgggacggtaattaacgcgatcagtatcgttaaccagatggcatgcaacatatcaggatctaaaagattctcagtgactatctcaacgcctttagaaaaggcagtcataaatatccagacaatcgggatcactaacagtaagattgaaaacaatacgcctgttatgatcaacgtccatttcgcccaatttacaggtggtcgttgcgctacataagattcagataattcaaccattaatgccctccaatccgcctaccaaagcggctttgcagagtattaatgctaaatagtaatatcagggatattgccaatataactgatgcgatagcactggctgcggggtaatcaaactcctgtaagcggataaaaatcatcagcgataccacttctgtctgccatgcaatgttaccggcaataaagatcactgcaccaaactcccccaggctgcgggtaaaagagagtgcggtgccggcaattaaagccggagataattctggcaatacaacccgccagaaagtttgccaacgattagcgcctaatgtttgagctgcttcttcatattctggccctagctcttcaagtaccggctgaatcgttcgcactacaaatggcagacttgtaaacgccatcgctaccgcaatacccaaccaagtatttactactttcacatcaaagtgcccaagcaaagagccataccaaccactcacagagaatagcgttgccaatgtcaatcccgctaccgcagtaggtaacgcaaaagggagatccatcaaaccatccaataagctacggcctgggaaacgatagcgggttaaaacccatgccatcaacataccaaacaccgcattaaacaagctggcaaccgctgctgctagcaatgtcactttataagctgctacaacttggggattagcaatcacctgccaatactgttcccaagtcatactggaaagctgcacaactaatgcactcaggggtaacaataaaatcaaacaggtatagaacaaactactgcctaaactcaacccaaaaccaggcaatactcgcttactggatctcgaaaacattacttatgcccctcggccagcaattggtccagtataccgccagtattaaagtgagttttcatcacttgtggccaactaccaaattgatcttccaatcgaaacagcttagttgctggaaaacgggctctctgttgattcatcacgtttttattactgacacgataattaaaactggtaatgatctgctgtgcttgtgggctataaagataattcagataagctttagccgctttctctgtaccgtttttcgcaatatgcttatcaatccaagccacagggaattccgccagaatacctaccggtggaacgagcacttcatatttatcctcaccatactgcttgcgaatgttgttcacttcagattcgaaactgatcagtacatcgcccaaaccacgctcaataaatgacgttgttgccccgcgaccaccagtatcaaacacagcaacatttttcaggaaacgttgcatccattcgcgagttttaccctgatctccaccattttcctgttgaataaccccccaagcggccaaataagcataacggccattaccggaggttttagggtttggcaagactaatttgacatcctgacgcactaaatcatcccaattacgaatatttttggggttacctttacgcacgagaaacgccatcgtggaatagtaaggtgaactgctatttggcaggcggttctgccaatcagccgagatcagattgccacgatcatgcaaaatttgcacatccgttacctgattgtaagtcaccacatcagcccgcaatccttgaagaattgccagtgcttgtttggaggagccagcgtgggattgtttgattatcaacttatcttgtggatactgctcattccactgtttttcaaattcaggattcaatgcagaaaataactcacgcgcaacatcataagagctgtttaatagctctacagcaaaggcatgactgctgcctaataaagttactactaccagtccgtttagtatcgtattttttattgaatactttttcattttccaccttatccgttatttcatcaaataacgcgccagtgactaatgtatccagtttatttataacagggtagataactatcgccgtttaatataccaaattgcacttagaaagtatgaaacgcaataagatgacaggaatatatccgtcatctttcaagttgcctctttgttggctgcactcactcaccccggtcacatcgttatctatgctcccggggattcgctcccttgccgtcgcgatgcatcttgaaatctattgggtataataaggtttttaaatgagaaatgcgggcctgttacggctccgcaagaggaacatcaaattcaccaaacccactcagtttatgtttttaatcagatatttttatcgcttccaaatgatacgttccactttccagtttttcagtacatcatcagaaggaatcaagccttcagggccattccaattacctgtaaacagataactgacatgtttgctctgtggggatacgcagacaatcgcgctcttctctgattcactcaccgcatttcggcaaacatcaaatgctttgctataaagtgccgaaaatggcatgccgacctttgttccccagacggttttaatatcttcatccaacacttcaatgcgattgacttttccatcagcctgaccaaataacgctatcttcaattgatcactatccattgcttgaaatactgtcaccaattggccattttttgtttccataccactgcgtaagtggtactttccatccaaccccttttctattgcctcttcattcattgctgtcagagcatttatttcccccaccccctgatctgagatttttaaggggctaccaaaccagctaataggagacaaatccgaccatgaaaaacccgatgaccccgtacaaccggccagcaacaatgcaccacttattatgaaaaaacgcaatcctgacaacatgttagttaaagtatacttctgcataacgggttcccttatgactcaatacagagataggcactgagacatcacatctgattgttagtttcagagaatatttaaattaattactttagattaatattttattgataaaatacaacttagcggtatcattacccccccataaaagtcattactattgataaggtcaatatgatgaaaaaaatatttataaccactgctttgattactttgttcagtatgccgtcaatggctcaagcctcacaaacgcaatttggtggtttttctggtcccgattcaacacagcctccggtccaagcagtaccacaaggtggttttatcgatcaaaatgcgagagtttccaccacccaacaagttaaaaatatgagagacgacagttgggtcgtgctggaagggcatattgaatcccgtatccacagtgatcacttcatattccgcgataatgccggaattgttgaagttgaagttgatcataaatactggaatggtcaaacgataacgcctcaagatagagtccgccttgaaggtgaagtcgataaagagtggaatggtatgactgttgatgtgaaaaaagtcaccaaattgaactaatgcttgcggctgagtggaattctttcactcagccatatctatacccgtcatctttcaagttgcctctttgttggcttcactcccttgccgtcgcgagccatcttgaaatccatagggtagaaactcaatattcctgatcaacaatcaaacgcttactgaaaataacgctctcttgatgacgatcttcatattccagtttttcacacatatagatagtggcatcattatcttcaggaacaataagaactatttttgggcaaccacgagcaatcaatttcttctccaaccgggcaattaatgcattcgcaattcccctaccgcgaaattcaggatgaactcctaaataataagctgaaccacgatgaccatcataaccacccataatcgtcccaaccacttcaccaaccacttccgcaactaaaaacaggtcaggatcatgcgtcaatttacgctcgatatccacttcagggtcaacaccaggattaagtaaatcgcagcgttcccataaggtgatcacttcttcaaaatcatcttgtcgaaatacccgaatttccatccctaaccaacctgtttttattgaaataactattttctcattatctccgctttaacaccggaatcaatacgaaaatgcgttctcttccactaatagctataatatagcgctcaccacaccataatgggaaaagaaccatgaatacaccaaacattaatcagattaaatcttttttcctttcattacaggatgaaatttgccaacaactggaacaaatagatggtaaagagaaatttactgagcagtgctggcaacgagaagaaggtggcggaggccgtagtcgaattatgaaagaaggcacgatatttgaacaagcaggcgctaatttttctcatgtatcaggagatatgcttcctttatcagcaacagctcaccgccctgaactggttggtcgtcattatcaggcgatgggcgtctccctcgttattcatcctttgaatccctatataccgaccagccatgctaatgttaggttctttattgcagaaaaagaaggtgaagcgccagtatggtggttcggtgggggttttgatttaacaccttattatggttttaaggaagatgctattcattggcacaccactgccagaaatatatgtcgaccctatggagaagatgtttacccaaaatataaagaatggtgtgataattatttctatattaaacatcgtaacgaagcccgcggaattggtggcttattctatgacgacttaaatacacctgactttgaacattgttttaattttactcaagatataggtaaagggttcctttctgcctatctacctattgtggaaaaaagaaaggagatattatggggtgaacgtgaacggcaatttcaattatatcgccgtggtcgctatgtagaatttaacctcgtttgggacagaggaactttatttggattacaaagtgggggacgaacagaatctatcttaatgtccatgccaccattagctcgctgggaacatgattatcaccctgaacccgaatctgcggaagccgctttatataccgactttctacccgcaaaaaactggatatgattttccatcatgttaggaatattataaaaaactattcctaactatttatatttttattacagccaatgcaagaatccctcacataaaaaaacttaacaacttgttaacaaacccttaacataaaagaagcaggttggccctgatgactatctgctggaaacatgtttaatatgaatccgtacttaaagagtacctctaattaaaactaaaaatttattccaggagatattttatgcaaatacaaaacaataactacagaggcttaataccgccgtacattcttcaaaatatttataataatgacaataaaaagaagaaagtattaatgacattaaatcatactaagagtttaatgttggacactgttattaacgaatcatccgatgattccgacgatgatgataaagttaccaaaacaactatacatcgttctattcacgatgcagaaaataaacgcaagttgccaggaaaattagtacgagatgaaggagacccagataacggagataaatcagttgataacgcatatagatatttagaagcaacttacaatttctataaagaagttttcaaccgcaattcattagatgataaaggaatgaaattgattgccaccgtgcattatggcgaagaatatatgaatgcattctggggcaacggacaaatggtatttggcgacggagatggcaaaacctttaatgatttcacaacctctgtcgatgtgatcggccatgaattatcacatggtgttattgaaaaaaccgcagatttggtctatttcttccagtctggcgcgttgaatgaatcaatagcggatgtttttggtacattagtaaaacaacattatctgaaacaaaaagctgaagaagctgattggattataggtagtgaattactgggcaaagacgttaaaggcgtagggattcgttcaatgaaaaacccaggcagtgcatatgatgataaggagctcggtaaagatccacagcctggtcatatggatgattataaagacttgccgatttatagagacaatggtggagttcatattaattcgggtattcctaataaagccttctataatctggcgataaaattaggtggatatgcctgggaaagagcaggaaaaatatggtacaacaccttgttggataaagatcttgcacgtgatactaacttcgtatccttcgctaaattaacaattaaacatgctcgtgagttatttgatgaagatgttgaaaaagcaacgattgatagctggacagaagtgggcgttaaagtgaaggaagataaagacgataaggacaaaaataaagataaaactgaagagtaatctataaccatatcgctggtgtaacgccagcgatattttattatttgtaatacctgactagtaaaaaaatatatctcatagaagatgctaaaattgttaacgccgaatttcacgctatactaaagagacctgaaaaataaccgtaaaaaattggtatatcatgaataataaaacgctcaaactcacaactgatagtaaaatcacaatttccctacaaggaggatttgccgctacacctggccttaaccaagataagacagtgaatttagaatcattatcttcacaccaacaacagttatttcttcaagccatagagcaagacttttccgattctatgccatcagcaccatatcctgataaagattattatctgctcagtatcgtcaatggaaatgaagaataccacttcacccttcctgagtcagatgcaccggaaatcattactcagatatggaacaccgacaaaaagggtggttaatcaccaccccttttcctattagcattaacgctttttcagatgcgccatcagacgtttacgtttacgcatttgatttggtgtcaacgtattacgtttgtcagcatagggattcgccccttctttaaattgaatccgaatgggcgtccccatcacttttagggatcggcggaaatagttcatcagataacgcttataagaatcaggcaaatcggttacctgattaccgtggatcacaacaattggcggattataaccaccagcatgagcatatttcattttcaccctgcgaccacggatcatcggcggttgatgatcttcttcggccatatgcatgatacgagttagcagtgaagtattgacacgacgagtggcgcaatcataagcctcaagaatcgagtcaaacagatttcccaccccactaccatgtagagcagagataaaatgtactctggcaaagtcaacaaaaccaagacgataatccagcatctctttcacacgctctttatcttcctgtgacataccatcccatttattgaccgcaataaccaatgagcgcccgctattaagaataaaacccaataatgacaaatcttgatcggaaatgccttctcgcgcatcgatcaccagcaatacaacgttagcatcttcaatcgcttgaagggttttgatgactgaaaatttttcaactgtttcagtgatcttaccccgcttacgtacccccgcggtatcaataaggatatattcacggccatcccgctccattggaatataaatactgtcacgggtagtgcctggcatatcgtaaaccacaaccctttcttcacccaagatacggttagtcaacgtagacttgcccacatttggcttaccgacaatggctagtttcaatggcagagttgatggatcaaaatcctcctcctcttctaccatctcaatttcattctgttcctgctctgcccaataagctgcgttggcctcttcctcagtcaactcaaccacttcttcttcacctttgccggaaaaaggcaacagtactcgttcgataagttgagtgacaccacgaccatgagaagccgcgatagaatagatatcccccaatccaagggaataaaattcagcaatagcggtatcaatatcaacaccgtcagttttattcgcgaccaaaaaagtagctttttcacgaccacgtagatgttttgctatcgcgtggtctgctggcatgagcccggcacgagcatctaccataaacagaacaatatcggcctcttcaatcgccaacaaagattgagctgccatatgggtttccacaccatcttcagtgccatcgataccaccggtatcaatgatgataaactcctgcccttcaacctcagctcgaccatatttacggtcgcgagtcagacctggaaaatccgctaccagcgcatctcttgtacgggttaaacggttaaataatgtggacttacccacatttgggcgccctaccagagcgacgacaggtatcatttgttgatgcctcatgacttaatttgaaattagtattccgctgttcatctagtgttaatcacaacagagcactaaaaagacgaaacggctcctgttctctccaggagccgtaggactataactatacccgttatctttcaagttgcctctttgttggctgcactccctcaccccggtcacatagttcgctatgctcccggggattcgctcccttgccgtcgcgatgcatcttgaaatccatagggtataacgctttactttatttccggtaaacaggcagtaagcaaaactcaacgcgtaaacagataaaccgtaccgtctttcgcctgtaccatcaatttatcactggcaacaaccggacgactcattaaaccggagctatcaactttatgttgggcaacaaacttaccgtcatccatattcagccagtgcagataaccttcactgtcaccgacaaccagatagccattatacatttcaggcgcggttaaattacggtgttgcaattttgtctgagtccacaaagtgacaccatcactttgacgcagacccataacacgatcgttttggtcaacaatatagatattatcaccataaacaaccatctcgttcactgaacccaaatcgcgcttccagaggatctgacctgaacgcatatcaagcgccaccagattaccgttataagctattgcatatatcacgccatcagaaataaccggtgtcgtatcaacatcattaagacgaccgatttctgtagaactggttacctgagaaatacgttgttgccaaatcaactgcccttgagaaatcaagacggcgttgacacgaccattatccccacccacgatggcagcaccgtaagccgcggcaggtgccgattcaccacgcaatgataatgatggtgtatccaaattaacggaccactgcactttaccatctgactcgtttaatgcctgcaacatcccattactggtatgaatcagcaccagaccatcactcaccacaggacgcgacaatgcttcaccggcaacgtcggattgccaggcaacttggccgtctttggtattcaatgcaataactttggcacgttcagtacctacatatagatgatccccagcaacggtcagaccaccagagagcaatgcaggtatacgagaagagaggaaacccgctttttccgccagattcaccgaccatatctctttaccactatcaatgtccaacgccttaacgatgccatgacgatcagcaacataaacagcggagccctgccaggttggcgtcaagtgagaataataacggcctacaccatcaccgacagatttatcccaaacttcgcttggattaaattgattttcgacctgtggcaatggtgacatcgttactgtatcttgctccgttgaacaaccggctagcagaacggaagccaccaaaccaaccaagagtgttttacgcagttgcattgaaagaattccccttagctggataagttattcaatttaagatttaacatcgatttgatcgcctgtggtgaatttgagctcaaacctttggtatacgctgcgcgggcaccagcaatatcaccttttttcaccagtgcatcaccgcgaatatcctctgcaacgccaacccaaccggaacctttgacctgttccaatgttttcagcgcagcatccgctttatcttccgccaattgaaccctggctaggcgaatattcaccagagcctgcaaatcctcattttttacctggccggtagccgcagataaaaactgatctgctttagttaattcattcttttcaacagcaagttgagccaaatgcatatgcgccatcacgccataactgttattggtttcactggcaaatttttcggcagcagtatgactctcttttgtactggtaattaatcctcgatctactcgttcaaaagcttctgcactttcctgcaactgatttgtctgatgagattgccagtaacgccagccaatcagcgccccggcccccaacaccagccctaaaaccaaggctttaccattattggcaaaaaagcgacgaatcacgtctacttgttcgttttcattggtatagacttccacagagtctctccttaacttaacagttcaaccaaacgagctgcaatttcgctttgcggcaacgtttgttgctcacctgtacgtaaatctttaatggctacttgaccagaacgaacttcatcctcaccgagaatcaatgcaattttggcgccttgtttatccgcacgccccagttgcttcttaaagttccctccgccgtggttcatcattaaacgcaattggggcaacgtatcacgtacttgttcagccaaaatcaatgccgcttgctgactaccttcaccaaaagaagcgagataaacatctgcaactgtccgctccgcaacaaatgctggattaatttcttgcaccagcaaaatcagacgctccatccccatggcaaaacccacagcaggcgttggtcgaccccccagttgctcaaccaacccatcgtaccgaccaccggcacagaccgtcccttgagccccgagtgccgttgtcacccattcaaatactgtgcggttataataatccagaccacgaaccaaacgctgattaatccgatatttgatacctgccccatcaagaagtgcacacaggccatcaaaatgttcctttgattcggcatcaagataatcacacagttccggtgcatcgttaagaagttgctgaacctctggattttttgaatccagaacacgtaatggattgctgtacatacggcgtttgcaatcttcatccagcttatcttggtgctgttcaagaaaagccaccaacgcttcgcggtaattagcgcgtgccgccaacgaaccaatggaattcagttcaagcgtcacatgctcaaaaataccgagctcacgccaccagcgagcagtcaataaaataagttcggcatcaatatcaggcccctgaagaccaaaaacttcagcacctaactgataaaattggcgataacggcctttttgtggacgctcataacggaacattggccctaaataccatacgcgctgttcctgattgtacagcagaccatgttcaataccggcacgcacacaacctgcggtattttcagggcgtagggtcacactttcaccattgcgatcatcaaaggtatacatctccttttcaaccacatcagtgacttccccaatagcccgtctaaataacggggtctgctctacaatcggtgtgcggatctcactataaccataacccgccagtactcgtttcaaaatagtttcgatacgctgccagataaccgtatctgccggcaagtagtcattcatgcctcgaatagcttggatattttttgccacgttttatctctagttaatgattcaaaaatgatattgcattgaagcgaatatcgacgagcttcaattaacaaacaaaacaacgctggctcatcatcacgataagccagtatcagatacattatttgtccagttgacttatgccaatgcgcttattttcatcgagcattgatgctttagcacggatcttagcctcaagctgatcgatcatatcagcattatcgagacgcactttctgccgtatcccatcttcataaaaaccacttttggttctggcaccggtgacacccagagtagaaacctccgcctcgccgggcccgttaaccacacaaccgataatagaaacatccatcggtgtgagtaaatcttctaaacgctgttctaaggcattcactgtgccaataacatcaaattcctgacgggaacaggttggacaagcgataaaatttataccacgggaacgaatacgtaatgctttcagaatgtcaaaacccactttaacttcttcgaccggatcggccgccaaagaaatacgtagggtatcaccgataccttccgacaggaggatacccaagccaatggcagattttacagagcctgcacgagcgccaccggcctcagtaataccaagatgcaatggctgctcaatctcttgggccaataaacggtaagcgccaaccgccagaaagacatccgacgcttttacactgattttaaactgatcgaaattaagcctgttaagaatatccacatggcgcatagccgattccagcaatgcttccggggttggctcaccatatttttcctgaatgtccttttccagtgatccgccatttacaccaatgcggattgggatatttttatcgcgggcagccgccacaacctcacggatacgcgcttcattaccgatattaccagggttaatccgcagacaatcgacaccatactctgcaactttaagtgcgatacggtaatcaaaatgaatatctgcaactaaaggaacattagcttgctgcttaatcaatttaaatgcttcggctgcgtccatcgttggtattgatacacggacaatatcaacgccaacacgctcaagcgatttaatctgtttaacagtcgcttccacatctgtagtacgtgtgtttgtcattgactgcaccgcaatgggcgcaccatccccgacgggcacattgcctacataaatacgcgtagatttgcgtctttttatcggcgattcattatgcatactgatgtttctcccatacttccatgtgtttactgataaaactacaactctatgccctactgcaacaggccttttattgtgctgtcggtaccttaagacgcgcgatacgactctctttaataaagcggcttaaatcgacaacttgcccccggaactgtacatccacaacagccggagcaccgatagttaactcataaggtaatgagccagagagactcagatggtcacccttatgtttagttccactaaatagtttttttccatttgcatcaacaacttgcaaccaacaagatgctttaaaattcatcatcaacttattactgtcagcgactgtcgttgaattattttcagacacactcggcacttgagctgtcccttgattagctgacaacggagcagtctgagcctgtggcccgttaccagctaattgagtttcaggtgttttcaccgcttgattttgcgttgatgccacagattgagccacttcctgatgatgactactggtattattcgcggccacggcattttcagctatattttcagcgacagctacagagggtgatggctcacttgttgcctgctcgcgggttggtaactgtgtcacctgatcgtgattttcagtgggtaaatcctctgagctggcttttttctgagcaattttagccgcggaatgatcagccatcgaaatcagttccttctgttgggctatgtggttttgccaccaccatgctcccgtcaaactaattacgactaaaataatcaaccacgtaatccacatcaaccaactttcgcgttttttacgttttttacccaacgaaaaactctgcatcggtgaaactttcgctgtttttgccggggtatgcttatccagaattgccagaatttctgcttctggaatttgtaccaacttagcataagagcgaacataaccacgcaggaaagtcggtaccatagtggctggaatattgtcctcttcaatatcacggatagtagaaagttttaaacacaagcgatcagctacagtctgctgggttagcccgtgttgttcacgagcctgacgcaggagctgacctgcggttaaataagcttgttctggagtcgtttcagtattcattagcaagaagacgcggtactgttcaggttgtgaaaaacttcgcgccggcaccttgctataatctttaaattacacaatggcctgcgcggcgaaatagatttgctattttactagcggcaaatcactgataacaaacacgcctgtcagcatagctcccagtaaacagagtcttgacttcttcatactgcccctgctcacagagaaaaacgctgtaatgatacaataccgtatcatttcctggcgcgtactgcatcgccattttgtaacgttgacgagcggcttccggttgaccagaatattgctcatacaacgccatacctaattgagcctgataatggtctggctttgccagtaaaaccttatcaaagtgatatctggcggcaggtaaattacctttagccagataggccattcccagttgaatccgggtttctgctgcgacttttcgctgttgattgccatttgttggttgattggcacatcctgccaacaacataacagccaccacggcaacaaccatcattcccgataacgatttccttatcattccatccccaccgaccaaagatatgccattgtaacgatcatttcacttatgtatttcaattactgcatggcaggacataccaacattcccattcagactgatcttatctgaataggttcaccggcctgacgttttttcaatgtacgtttggtacgatcaatgacatcaccggcaagctgaccacatgcagcatcgatatcatcaccgcgcgtcttgcggacaatcgtggtgaaaccatattccatcagcaccttagcaaagcgatcaatccggctgttggaactacggccatatggtgcccccggaaatgggttccacgggatcagattgatcttactcggcgtctctttcaagcattcagctaattgatgtgcctgttccacgctgtcattaatatgatccagcatgacatattccacggttacacgcccctgattagcattagatttagtcaaatagcggcgcacaccggcaagaaactgctcgatattatatttacggttgataggaacgatgtcatcccgtacatcatctgttggtgcatgcagggaaatggccaaagcaacatcaatcatatcgccaagtttatccagtgctggcacgacaccggatgtggataacgtcacacggcgctttgacaaaccgaaaccaaaatcatccatcatgatttccatcgcaggcaccacgttatttaggttaagcagcggttctcccatccccatcatcaccacattggtaatcgggcgacggccactggatttcagtgaaccaataatttttgcggcacgccaaacttgaccaataatttcagaaacccgcaaattacggttaaacccttgctgagcagtggaacagaatttacactccagtgcacaacctacctgagaagagacacacaaggttgcgcgatcatcttccgggatataaaccgtttcaacctgctgatcgccaacagtgatcgcccatttaatcgtaccatcggccgaacgttgctcttctgctacttcaggtgcgcggatctctgcaacttgctgcaattttgctcgcagaattttgttaatatctgtcatctgctcaaaatcgtcataacagtagtgatatatccatttcatcacttgatcagcacggaagggtttttctcccatgtcaatgaaaaactggcgcatttgcttgcgattcagatcaagcaggttaattttaccgcctttcttttctggagtttcagacacgacagaagcagcaaattgtgccgcagtatttggttgggacatctttttatatcgcctcgttgtaacactttcggctctgcgttaatgaactcaacgcgaagtttcaattcaggtcactatcagtttagtatagtaacaaataataagcgccccgttgaattaacaacggggcgccgcattgtacaaactttaatgcaatgatgctacgggtaacggcaaatcaattaacgtgggcaaatttcatcttctgtgaagaaataagcaatttcacggtttgcagattccaccgcatcagagccgtgaaccgcgttttcagtgaagctatccgcgtaatcggcgcgcagagtacctgctaatgcattatcaggattagttgcccccatcaggtcacggtgacgctgcactgcattctcaccttccaatacctgaaccacaatcggaccagaagtcataaattccaccaaaccatcaaaaaaaggacggcctttgtgctccgcatagaaaccctcagcctgttcacgggtcaggtgaagcattttggcggcaataattttaaacccggcgctttcaaaacgagcataaatcgccccaatggcatttttcttcaccgcgttaggcttaataatagaaaaagtacgttcaaccgtcatggataacctcttggttcttctgtcagcaactgataattttaatttttcccgataagttaatcggttaatacttcattccgccaccttagcggagataaaaacggcgttgattataggggtacgaatagcggttgcctacagaaaacataacattccattaaattttccttagcgaaaattaccattttttcgtacaaatcacacttttacctgaatcgtttacttcaaggtaaaattgacagcatcaacctgtccacccaaatccaaaacactaagctgatatttacccggttgagttaaagtctgaacaaatccctgattattttcggtggtcattacctgttctccattcagaaaccaccattgctgcccaccactaccgccctgagtggtaacacgtaaatcaaggctgccaaaaccgggaagccgtttcaatacatctccgttatgaatacccacgatcaacaaaggtgcttcatctgatttcaacggtgggcactcagggttaaccggtggcaaacgctgcgcccgtcgctcttgtgccggtaaccatgattcgagggtaatcggccacaaagcgatatttttagcctgagcaccgggacaatcaggagccacgcgcaaaccatgcttatccaaccacacctgttcattagtgcctgaaatagcctcttgccctaccgcaggcagcgtaggcggaatagtgttattcagtatccagctcagacgccgctgacggcaattattctcttccttcggtaaactctgccctcccggccaacagatgattgcccgactgacacttgctggacgcggatcaaccggaatccgtttagtcccatttcgcatattgacgaataacagattattgacctgattcatgatgggaatcgccgtagcatagccgaactgcccgacaaccggcgtgccatccggcctgccaacccaaacaccgatggtataacgcgcacttaagccaatagcccaagcatcacggtagccatagctggtaccggttttccaagccaacggcacttgtgccggtaacacatcatcaggttgcggcagagcttctccagccataatccgcctgactatccatgccgcgccgggggaaaaaagctgccgatcacgcaatttctgctgcggagtgaatctcaaaggggaaaccctcccctgacgggcaaacgccgtgtaagccgccaccagttgatccatccgggttgccgtgccaccaagaatcaatgataaattgggttcactgccgggaggaaaacgcaatacggttcccacattacgcatgttggcggtaaaccgcttggcaccataggcttcaagcagttgcacggcgggcaaattcagtgaacgaaccaacgcctcactggcactgaccggcccatgaaagccactgtcaaaatttcccgggcgataataatcaaagcggcgaggcacatcctgtaacagtgattccccatgaatcaacccatcatccagcgccattgcatacaaaaatggtttcagagttgatcccggcgaacgccatgaacttatcatatcgacatgaccaaaacggctatcatcccgtagatccagcgaaccgatataggcttttaccgccatgtctgtatgatcaaccactaacacgccaatcgacgttttttctggtaactggtactgccaattcaccgccatatcttcaagctgacgctgtaatcccacatccaaggttgttttaatgatctcctgacgaatgcctttcgccattcttctggcaagcaaaggagcaagctgtggcacctgccggggagccaaccacaacgtttcttgccgaatatcagcaatcgtctgttccgaccagattttatagtgcgccaaccgttgcaacaccttatcacgagcagcctgtgcccgttcaggatagcgatctggccttaaacgactaggggcctgtggcaaaacagccagtaaagccgcttctcccgccgaaagctcagagggcggtttagccaaatatgcccaactcgccgcaccgacaccttgtaatgtgcctccaaacggcgcacgattcagatacatttccagaatttcatctttagaatagtgccattcaagctgcaaagtacgccagatctgcttcaacttcccgcctaaagtgcgtgaatgggggtcaatcaaccgggctacctgcattgacagcgtactaccgccggacaaaattttacctgccagaatatcctgccaggcagccctgaccagagaaatcgggttaatccccggatgctggtagaaccaacgatcttcataagtcagcaaagcctgaatatattccggcgacacttgacccaacgtcaccggataacgccaaacaccttcatcatcggcaaaacgccaaagtggcgtaccatcctcactcacgacaatacgcgccattttgacttcacgcagtggcagaggccagattttatctgccagccataaacccgccggaaacaaaaacaacaacagtacaatcagccacataaggcgatacggtttcttcattaatgaacacctggagagaaaccagcccttacaccggagcataagggctgacaaatttagcggacaacttccagtttttcaggtgtagaacccactgcacgccagtaaggcacatacatagattccacctgtggtgcaggaatggtgtagacgcctggcgtcacggcgcgagccagatagagcaacgtcactggctgagacggatcaaccgcgactgccgccacatatcgatcatcacgatattcaatatgatgaatcgtcgcctgttgcatatcgccaatcaactcctgaagattagcggcactctcactcaacttggcactgctgttagccaagttctggttttccagctccaaaccagcgggcaataaatcaacaaccaaagcatcctgtacgggtttatctgagctcaccaccagcttcacaaccaccatatcaccgctattcagaagatcactggcaatcggattacccttcatatccaaatagctacgctgaattttcagcacattagcataaggcttcggagagcgcagcgggtaggccaccacattcactcgtgaatagagcgtgctgtcaccaaggttactgaaactcacaccttgctgaatatcctgtggatacagcatctcactataggacttatccctacttattggtaaagtccgctgattaatcaccgctttccacggttgcaccgacgcatcgataaagaaacgccccgccagatagagtgaattactctcctgagttgagaaataattgcgggatgtcaattcatcagacagcgccagcaatttctcatcacgttcctttatttgcatgttattttcagtcaacagagcaacaatcatggcgttgtcacggatggcactgccgtaatcacctaactctaaatcgtcatgacggtttttactgatccccaaacgaaccgcttcatctgctcgggtgttatcccccatcagtttcagtgcaacacccagttgtaccagtgacaagccattacctgcttgctgacggcgttcataaacttgtctcagagcgcccaatggtgctttctgttgattggcaagcaccagaccagcataagactgaaccgagaatcgcattgcgtcctgattctggctgtagggatagttaataacactcttatcctgtaaataacgtaacagacggttattggcagaagtcagtacctctttaggtacgctgtaacctcgttgacttgcacggaatagaaaatcggtggcataggcggttaaccaatactcttcatcaccggttttatcccataaagcaaagctaccgtcatgacgctgcatactcaacagatgaataattccctcatcaatactcgcccggcgtttattatcatcttccgctctgatacccaaactattcagctctgatttgttcgaatagagtgacggataaagcccactgattgtctgttcaagacagccatatggataggcgtacaattcacgaatatagcgtgaaatctgtaacggtggacggctgctcagtaacaactgcccctcggcgccttctggcgataaacccgataaagcatttaacggcaactgccactcctctcccggatgaataacattagcgaacagaaccgtttccgctggctgtgccggacgcacaccaatctgccaactatttttatacggtttcagattttcaccgggtaaattcagaccatcaaccgtcaaggaaacctctccttgaccaaaccccaaatccgctgtgaccggaatctctactgtggtgcgtttgcccttttccaatgttatctctttactaacatccccctctaacttaatcaggtcattagccgcaaagttcaaggtcaagttttgcgtctgttcagtcaagttagtcaaatccaacgacaacaatgcgctatcaccaccggccataaagcgaggtagtgccatctgtgcaaccaccggcgcagcaacgacaactttattttcaccgtggccgaactcatcttcactccacgcttgagccatcaacctcaattcaccattgaaatcggggattggcaaaacgatctgcccttcgccattttcatccagcgtcactggctgagcttgttcagcgataatcttaacttcggttaatggctttctgccgccacgatcaagggcgctatcatcaccatcaccgccaaaacgcagattcgccagacggccttcaccttcaatcaactgaccatacacatcatattgatcgacactgtaacgcttacgaccaaagaaagcctcataggggtccggcgttttaaaattcgtgacattcagcacccccatatcgacagcagaaagcagaacattaacctgcttgggtaacttccgcccttgctgtggtgtcgccttgactttaacagtcaagttctgattcggacgcattttttccggtgcggatagcgtcaaatccagtttacgattttcatcagccaacggcagatgcaacacgccaatggcgcgtttcggtgtcacctgacgagatttatcctctggacgcaccaccacagcggttaaataaaggtcatgacgacgccactctttatttaccggcacttccacatccaaaccttgctctggcacatcaattttttgccaccaaagtggcccttcactggactctaccaacagataacctttaccggcctgtggtgcaaccatatgcagttttatcttctcacctacctgataagcgggtttatccagagataacttcacctgatcaggacgaacagcccctgtaccaccggtattgtcctgccatgagtaacccgcccagaaattaacgctggtcactaattgattttctggattaaccacttcaatacggtacgacccccaatcaaccggaaaactgacctttgccgtaccatcttgagcaatctggatatgttcatccgccatcactaaatctttctggtcatagcctgattgccaaccttcaccatccgaccaacgccaataatagtcacggcgttcataaaccagacgggcagttaaatcttttgccgcatatttttttccattggcatcggcatacaccaccgcaaattgcgccagtgaattttcatccacattgtaacggctttgataacgacctatgcgatagtcataaatctctttctgattaaacaacggacggataccaaccagcttttcagtcggccaaacagcctgttcaacccgacgagttaccgggcggccaccagattcaagcaaactagcctgtacaatgacatttaccggcgaaaagaccgaacgccaattgtcggcactgacattaattacggctttaccctcattacctaaaaccaggtcaaattcatccaatgtacgactaagattgtcctctgcaaccgcaccaaactcatagcctggcaattttgctaccgcatcccgagctggacgcaggaatagttgcccttgcaggcgattatatgcagcaggtgctccatatagataacggccgttaatcgcgaaatccacatcgtggtctttcatcaccggttgcgactcactactaatttccagtgccatacgctccggcataaaatcttcgacattaaacttgtaataacggagtttgttatcgcccaaatcaaaacgtagcgaccagagcccggtagtcgctgactgggggatcgcatagcgatactgatacaacccattttcgggttgccagacaaaactacgaacaacctgaccatcggttttcaatacatccactttaactggctgacttttcattgcgcggccatcaccatcacgcagcaggccattaacaatcaacgtttcacccggacgatagagatcacgaggcccaaaaacaaaaaactgtttgctatacccttgcgggccggaaatatcaaattcagacagatccagcgccggtgataccaaatcaatcatactggtttggtgatcacgggtagcgagcaatagcttcgctttcgcatttttttctaagctggcgtgcccatcatcgtccgtcgttgcctttgtcaataactgccctttgtcatccaacaaacgtatttccacccctttcaggctgccaccttgtgccaaagattgggtaaacagatccattttatccagatagctgtgcacagaaacaccaatatcacttaaggtaaacattgtcgctggattggagtcagtgtatttacctgcttgttgcatcaccgccagataaaccccatcttgctgtaactctttgatattacttaatggtaacagtaatttttcgcgggtattcagtgttggattcagatcgaaacggccggtataaaccagttccgcatctttgagcatctcttccgattcccaagaactcatattgttgcgatattgccactgtgcaataaaagccggtaatgccgtctcttttattctgaaaaaattaacatcaacacgattaacattcagagccaataccggcaaaccttcagcaactttactgggtaacaaagagcctttgctggcaaaaccgacagacggagaaatcgtcgcggttgtcagcgttttctcataagccgtttcgagttgacgattattgatacctttaacatctttatctacggtcaattgcaacttacgggagggcggcaaatggcgcaagcgcagttccatcatgttatctgacagttcccacgccccatcaagtttgccctctttgacatccaccaaacggacattctgtgcaaaatcctgattcggatctaaagggacagaaaatgtcaccaccattgcactagcgccatcaagctgaacttcagaagcatccagaatcttcactggtttaccggcataacgttttactaattcagccagtgatgctgcgtctttcggttttactgattttggtggagtatttgattgttgaggtgctttttcgctttgaatttctgtggactgcgattgagccgcttgcttattatcagtgctatcagattggtcacaaccagaaagcatcagcaaaaacgctaaaatcaccgccaaataacatttatttattcctggctgttgccagaattgaccttgattcataaccataacccctgtcttaactccgaccaactaatggctggtaggatttaatgaataactttatatacccgttatctttcaagttgcctctttgttggctgcactcgctcaccccggtcacatcgttatctatgttatctatgctcccggggattctctcccttaccgtcgcgatccatcttgaaatccattgggtataaatcaatatattaaatttaaatcaaatagatataatcacctatatacctatgatcaacttatataccgcctatttatataagcaacgtaaagacattaagttcatatatccgtcatctttcaagttgcctctttgttggctgcattctctcaccctggtcacatcgttatctatgctcccggggattcgctcccttgccgccgcgatgcatcttgaaatctattgggtatataatagcctgttattttaatgaattaaacatcacagaaacgataaataaatataaatttatcgattcaatttttcattaagaactcaatatatcttgtaaaaaaaattttcgtcattttcctcagtgaccgaagatagagcttcactgcaccatccgcttgataatttacaaacagtaaaataatataaaatcgaccattaaaacaaattaaataaaataggaaattatcattattgtaccggttataaatatcattatcggattaaatatatctggttccaatataccattatttaataaattaattatctcaaccaataaaatcaataaataactttaataaaagtatatttaacattttatttaatacattattaaccatttattgagactaatcattatctcaataagatatttataacaaatatacccgccatctttcaagttgcctctttgttggctgcactcactcaccccggtcacatagttacctatgctcccgaggattcgctcccttgccgtcgcgatccatcttgaaatccattgggtataaaagctatgtaaataaaacacatttaacttctgatgcagaaattaccattaatctgtaatctataatctataatctataatctataatctataaatagagtgccactttcctatcaaaagtggcaataatgatttgcgtgaaacacggaatatacaaattgttttttataaaataacaataaaaccctcaaccccaacgctatcgcaaatggggtaataacctgatgaacatccattttctcaacgactttcattatgttactcgactaataatacctgtcctgtttttagctgtttgacatttggtaaccacagtcttccccagctaccagtacaatgacatccatagacctcttttatattttcttttataaaaaattctctgatcttcaataactccgtcggtaacgctctccttaaatgcaatccgcctattaccgcgcatactttgtccacaccggtaatcattttagcgtggttaataatttcacaaataccagaatgaccacagccaacgataatcaccaatccattatcacttttccaaattaacgcactatcatccaatatataatcattggcccaagagctctttctaattaatccaaaggattttcgatgatcatttgctatttcccctgaaaaaataaatcgctcacttatcttcatatgcgatttcgttaaccgaaaaaaaactctcttcttgactcgtttattaattttacccgacatttttttaaattttaacgcaattttcctgaacataacgccataatacttctcatttaatgcatcaggatgacatattaatttagcattatgtggaaaatagttaacaccacctatatgatcagaatgcccatgagagataacaattttggatatatcatcaatagatatccccatcctatttgcattctcaatatagctaccatccgggccggtatcaaaaattatcttctcttcaccatcttcaagtaaaagactcaaaccaggcttagctatcaaatatgaatcagatgttttattttccagtagtacagttatttttaacgacatagcacatccattaattttgttgaagtcatgcttctattaaacggtacgggtaacaatagcattgacgtacatcaataaaataatgaaaagccattatatcgtcacatttttataagcagatcacaaattccttctcctcgactgacagttaatttttcaacatgaaatgattatctctctgtcatatttattgtcttgcaatattaacatacaaatattataccttgctgtacaacatatttttaaaagaagagataaatatattattaataaataaaaatcaacggcaagccattcaattaatttaatcaaatagactatactaatgcctcacataattgacaatgattaattttagatatcactataagaccagcaattgacttatattaccacgctcatttcatccatattataagataaaaatataatatatttatcaaatataatttaactttatattacataaaaaacatttaaatagcataattaataacgttatatataaacatcatctgttgttataaacataacctattcacttatatcaaaccattattaatgcctttattaatacgataacaaaaatatattatttttatgtaaaaaaatagaattaatatatttcttggattcacataataagtgcaacatcgttaatccggaagtaaacatatccgtattccttataaataattcattggatgttttactacccttagttttcgtgagcgattacttaatcggtttatacccgtcatctttcaagttgcctctttgttggctgcactcactcaccccggtcacatagttacctatgctcccggggattcgctcccttgccgccgcgaagcatcttgaaatccatagggtataccacaaaatctatttcctgctcagagacttcattaaaatcggttccctttagaaagtattaactgattaacccattgatatttttattgctcccttctttcccaagataaatagggtgagaaaagtaaatttacgcctctaatttagttcatgctctccaaactccaaacatcgtatcatcttcccaatagccactacgttcaactctccaatcacggagaatggcgctaacaaatcatgctatttatcccatatgattatgaaggatttaggttaagtgatcttctggtagaacgagcggcagataataagcaagattggcatggataaccctaacccctcacataaccataaaagacgatatttcatcacaaatttacaataagaatcacatttcatttgaatgaataccgaaatcaatcattataaatgtgatattaatcacataataaaaacaaaaagataaaattaatttgaaattattaatgttgattattaaatgattaatattaatctgttttttatacaatgctgttacaaaataatcacattggcctgttttttgctttgtcatataacctcttgtttttgctgctatcttaaccaaccccctattttagttgcccggttgataatcaacactaaatattgatctctaagttaaattcgtggttaatgctgtttcaacattgtggaatagcaagtcaatgaaaagcagtattgtagtattaatagttttttgtagcgcagtctcaggtagtcaagccgccgacatcgcagatcaacaactcattcatcaacaggcccgccagcaagccctggagacgcaattagccccgccgcctgcggaggttcacctgtcggtaccggaaaccggggaatcatccgcctttgcggtggaaactccgtgttttcccattacccacgtcagactggcaggtaccgaaaatttcccgcactggttaccgttccggcttgtcgcccaacagggcgaaaaccattgtctgggcgataaaggcattagccggctgataacccaattgcaagatcagctcattaatcacggctatgtcaccagccgggttctggttcctcgtcaggatttgcgtacccaaaccttaaaactggtgatgataccgggaaaaatccggcatatccgctatacccctgacagcgggaactatatccagcggataaccccctttcccgcgcgtgaaggaaaattactggatttacgggatattgagcagggattagaaaatctgcaacgtttccccaccgttcaggcagatatgaacattgtcccggcagagcaaccgggggagagcgatattgtgctggactggcgtcagtcccggcactggcgagtcgcgacttatctggatgataccggctccaaaagcaccggacgttatcagggcggactcaccttctttctggataatcccctggcgttaagtgatctgttttatctttccggtggacgcgatattcattcgtctgccgggaaaggcagccaaaatgacacgctctattactctttgcccttcggctactggatggcgagcgtgacggccagtcattacgattatacccagacaatagccgggctgaatcaggcgatccaatatcggggcaaaagccaaaacctggcggttcagcttagccgggtgctgcaccgtaatgccgaccagaaaaccctgcttaacggtgaaatttatcgtcgggcgtctcgcaattttattgataacactgaaatcgacgttcagcgccgggaaaccgcgggctggaagctggggctgtcccatcatcactttatcggcagcgcgacgctggatacccgggtgacttatcaacagggcatgcgctggtttggcgcacaaccggcaccggaagagtaccgcaatgaagggactgccttacccaaaatcacccagttctcagcgacgcttgccgggccgttaacactgttttctcagcccttttcttatcaaacccaatatttgcgtcagataagcgccagcccattgacgccccaggatcgcttctcgattggcggtcgctggacggtgcgcggctttgatggcgagttgaccttatccgctgatcggggttggtacagccgcaacgaactggactggcaaaccccgctgaaagggcaatcgctgtatctggcaatggattatggcgaagtgggcggacggggcagcgatacactgctcggaaaacacctggcggggagcgctctgggctggcgaggcagcctgaaaggggtgagctacgacctgtttgtcggtgtcccgctatccaaacccgccggtttcccaacctcccccgtcacggccggattcaacctgtattggcagtattaattcaaatagcaaaactgccggtgggtagtgttgtgtggagtaaaaatcatgaacaagcagttatatcgtattatctttaatcaatctcgccagatgtggatggtggtggccgagatagcgcgggccggacggggaagaaccggacgccgcgcacgtcgctccgcttcaccgccgcgttgttgccggctgactgcgctacggtttggggtgttattcgcccttggcggaatttcgcttacggcacaggcggcgattgtggccgacggacaggcaccggggcgtcagcagccgactattattcgcagcgccaacggcacgccgcaggtcaatattcagacgccgggcgccgatggcgtttcccacaatacctaccgtcagtttgacgtggataaacagggagttatcctcaataacagccatcaggctacgcagacgcaactcggcggcatggtggcgggcaatccgtggttagctaaaggggatgcccgcgttatcctcaatgaagtcaacaaccataaccgcagtcacctcaacggctggattgaagtggccgggcataaagccgaggtgattattgccaatccggcgggcatcacctgtaacggttgcgggttcattaactcacatcgcaccacgctcactaccggacaagcgctgatggagcgaggccggctgaaaggatttgatgtcaatcagggggaagtgcggattgacgggcacggcatggacagcacacagcaaagttacaccgatattatcgcccgttccgtggcgattaacgccaaattacacgcgcaagacctgaaagtgaccaccgggcgcaatattgtggatgcggcgcatcagcaggtggagaaaaaatcggttgacgatgaaaagcacccggcgtttgcgttggatgtggcggcgctgggcggcatgtatgcccataaaatcaggctgataggcaccgaaacgggggtgggcgtgcacaatgccggtaatatcggcgcgtctgccggggagttccatatcaccgccgagggccggatagagaaccgcggcaccctcagcagccgggatacgttgcaattaacctcgtctgccgatgtcactaacaccggcaaattgctgtcacaatcggcggtgaatttacaggctaaaggtgcgctcaataatcagggccgggtggaagcccgcggcgataccaccgttactgcgggcacgatacacagcagccatgacagcgtatgggccgcggggctggatgataacggcaacactacccgacccggctcattgaccctgaccgcgcagcacgttcaggctaagggcaaaaatctggccaccaatacgctggctatccacagtcggcagattgacctgagcgacagccagactgcggccggacagattcaactcacagccggtcaatcgggcatcagtaccgctcgcgccagcgtcaacgccgaccgtttgaccgcaaaaacgccgggccagtttaacaacgacggcggccagttagtggcgagggcaatccacctcacaacgccggatttatccaatcagcagggaaaaattaaccagaccggtaccggtgaactgacgctccatacccgcaccctgaataaccgtgaagggacagtgttcaatcaggggaaattgaccctcaccactgaccggcttaacaaccgtcagggcactattgccagtcagggcgaggacctgcatctcaccgcgcatcaggccgataacaaccagggaacggtgcaactggcaggcaacgggaaactgtcgctcaacacgcaacggtggctgggtgataagggcaaattgctcaccaatggcaccctgacgatacaggccggtgaactgcaactcaaccacgccgaaactcaggccgggcagataaccatcaacgccgatactttgagccatcaaagcggcgtgatgcaacaatggggtaaggatgacttgtccctcactacccggatactggataaccacagcggcactattgcgggcaatggcaacctgaaccttaaggcaacgaccgtcgataatcgtcacggcaatatcgtggccgccgaccaaggttcgctgaaactgaccgtcaaagacacgctggataatcagtcgggcaaactggaagcgggccacgcgctccaacttagcgccactcaactggataatcgccgggggagcattgttgccgccggggacagcgccaccctcaccgttggcaaaactattcaaaacgctcacggccatcttgaagcccaaacccgactgactacgactagccagacgttggataacacccagggggtgttgctggcacaaaacattgacagccagaccacaggccatcccttcaccaataccgccggacaggtgatagccgaagacaccctgacggtcaacagtggtcaactggataatacggcggggctgttacaggccggtcgcgagatggccgttgatacccacgggcatgggctcaccaatacccaccatgccgaccaaaaagcgggccggttattgagtggcgggcagttaactttgcgcaccggcgacatcgacaacaccggagggatgatcgcagcggacggcaaaaccgtgctgaccagcaccgcgctcaataatactcagggccagatagccgggaatggcgggctggacattcacagtcaacaactgataaaccgcgaggggaccttacaatccgccgacgccctgactctggataccgacggccagttactggataaccaacaaggccagattatgggtgagggcaagaccactatcaccagcggcccactggacaatcgccacggtcatctgcaaggcggacagttggctattgacacccgacacgccgcgctggataaccgggacggcaaactgttatccaccgacacgttaaccctgaacactcaccagctcgacaatcgtcatgggcaggtgcaggcggtgggcaacaccgtgttgaatgttaagactcaaaccgataacaccggtggccttatccgtggtggcacgcaactcaccctgaacaccgctcacctgattaaccgcgagacagcacacacggataacgggctggaagcgcaaaacctgacggtaaacgcgcaacaggtagacaatactcagggcgctttacgggcagccaaccatctgcaagttcaggtgagtcacacgctggagaatgctcaggggttaatctccgcgggcaaacagcttaccgtaggcgacgcgacccgtcctgcgtctctggtgattaacaaccggcaaggcaccctgattgccggggaacaggccacgattaacgcacatggcctgagtggggacggccaactgttatcacagggcgatatggcggtcaccttaaccgaggattttcaccataccggcaacacggcggccaatggcaatctgaccctgaaaacgaccggcaatcttatcaatgaccgccagataaaagccggtcaaacgctgcatcttgatgcacacaacctcaccaatagcgcctccggtgaaattagcgccggacaaacacaaatccaggtccacgatacgctgaacaacaccggactgattgacggcggcctgacccacctcacggctaataccctgaacaacatgggtaccgggcgtatttacggtgaccaacttgccctccagacgggcacgttgaataacaccgcacaaaacggcaaagccgcggtgattgccgcgcgtgaccggctggatattggcaccggcacactgaacaacagtgaccatgcccagatttacagcgtgggcgacctgcacatcggcggccggttggataacaccctgacggccaccggtcaagcccgtgtgctcaataaccacgccgcgacgattgaagccgggcgcaacctgaagattcaggctgaccggattaacaacaccaacgccgggttggtgactcaggtcgtcgaaacggaaaaatcgccacatcacgatgccgtactgagcggccagaccacccgttacgactggtcgcaggtagacacctcccgccacaataaatacggcgtgcacgatgccatcatgccggacggcagcggcagtaatgacttttacgaatatcagtacacccgcaccgtcagggaaactcaggttaaacagagtgaccccggtaaaattctggccgggggtaatatcacgctcaacagtgcgcaggtcactaatcacgacagccagattgttgctggcggcacgctcggtggtgaaattggcgaactgcacaatattgccactcagggcgaacgtatcaccactgataccggcagtcagacccactggtatgcaaaaaagaaacgactgaagccccgattccgtggtaccaaaacctcacaagggaaaagccgcagccgttatgctcccgcgccggtaatagaaacgattgatttgaaaacgctggcctggcaggcgcatacccgtccacagggtaccgatattacgattacggaccgacaaaccggccagatacacgctgcccccacggcggtcacaccggtgaacggtatcaacaaccagccgctggtgctgcctcccggtcagccgtttgaactgagtttgcccccggagaccgtcaaaggacaaactgtcgacccggtgatacgcgtggtgacgcccgatacccgcttgccgaataacagcctgtataccgtgcaaccgggcagtgacagtcactatctggtcgaaaccgacccgaaattcacccagtataagcagtggctgggctcggactatatgcgggaacaactcactcacgacccggcgctggtccacaaacgtctgggcgatgggttctatgaacagcgtttggtgcgtgaccaaatcacccaactgaccggccagcgctatctgtccggttacaacaacgacgaagcgcagtttaaagcgttgatggatgccggcgttgcctttggcaaacagcagcaattaacgccgggcgtcgccttaagcccggcacagatggcgctgctgacctcagacattatctggctgactaaccaaaccgtgactttgccggatggcactaccgaggtggtcaccgtgccgcaggtttatgcgcgcgtccgtcagggcgacctgcgcagtgacggtgccttgctggccgggaataccgtggcgctcaacaatcaaggcgatatcaccaacagcggcaccatcagcgggcgtgacgtcactcaactgacggccaacaacctcaccaatagcggctttattcgcggcggtaaagtagatttagcggcccaacagacgctcaccaaccggggcggccagattcagggagatgaccgggtgactctgaaaggccgggatatcaccagcgcatcgaccgtgcgcggggatgaagctaaccgctggctggaccgtccggcaggcatctatgtgcagaacgataaaggcaccttatcgctgagcgccattaacaatgtccaattaaccgccagtgacgtcaagaatgccggtaaagacggtcacaccgagataacggcaggccataacctgacgctggacgccttaagcacgcgccgcacagagcaaggcgactgggggaaagataacacccgccatctgacccaacaacaggatatcggcagccagataaccggcaccggtgaggtgaccctgcaagccgggcaggatttgaacgccaccgccgctcacgtcaacgccggtcaacacctgacggcgcaggccggaaatagcctgacgctgaccaccgggaccgcctcatccgacttagtggagcacagcaagcaaaccagcaaaggctggctgtcgaaatcgtcagtggaaacccacgatgaagtgcatgaccggcaggcgctcagtaccacattcagtggcgataaagtgaatttacaggccggaaaagacctcaatatccgcggcagcaatgtggcgggcacgcaggatgtcagcctgaacgccggtcatcagctcaccgtcaccaccgccgcggaatctcacgatgaaacccatttgcggcaggagaaaaaatcgggcctgatggggactggggggattggcttcaccttaggtaaagccagccagaaagtcaccaccgacagtgaccgccagctgagtaaaggcagcacggtcggcagcagtcagggcaacgtcaccctcaacgccggagaacagctccgggttcacggcagtgaggtgattgccggtaaagacctgacgctgaccggtcaacaggtcgatatcaccagcgcggaaaaccgccatcacaccacgacaaaaaccgaacaaaaacagagcggtttaaccgtggcgctgagtggtgccgctgggggtgccgtcaacagcgcggtgcaaacagccagagccgcccgcactgaaagtgacccgcgagtaaaagccctgcaaaacactcaagccgccctcagcggagtgcaagcggcgcaggctggccgactggcggcggctcagggcagtgacgacaaaggcaataataatctggccggggtgagcctgtcttacggtcggcaatcttcccgttcagaacagcagcaccgccagaccacccaacagggcagccatctcactgcgggagataacctcacgataaccgccaaaggggatgacaaaggcgcatcaggccagaatggcgatatccgcattcagggcagccagttacaggcgggtaaagacctgcaactgaatgctcaccgggatattcagctctcctccagccagaacaccgaacagacgaccggcaaaaacagcagccacggcagcgcgctgggtgtgggcctgaccgtgggaccgggagggactggtttgaacatctcggccaatgtcagtcggggcaacggccgtgaaaacggcaacggcgtcagtcacactaacaccacgttacaggcgggacagaccgtcgggctgaacagtggccgggacacgacgttaaaaggcgctcaggtcagcggcgaacagattaccgccgaggtgaaacgtcatctgaccctcagcagcgagcaggatagccagcgctatgacagccaacaacagaatgccagcgccggcgtcagtgccaccgtaggccccctcaccaatggtaccgcgagcctcaatgccagccgcaataaactccacagcaactatgacagcgtgcaagagcagaccgggctgtttgccggtcaaggcggctatcaggttaatgtcggtgaccacacccaactggacggcgcggtgatagcgagtcaagccgacaaagccaacaacaccctgaacaccgggacgctgggcttcaaggatattaaaaatcaagcggactttactgttgagcaacaaagtgcgggcatcagcctcggccaaccgaccgccggtcaggttctcaataatctggcggtcaatgggctgacagggactcataactcaggccatgacagcaccaccacgcacgccgccgtcagtgacggcaatctgattatccgggataaggcgcaccagacgcaggatatcgcgaacttaagtcgcgataccgataatgccgcgaatgtcctgagtccgatatttgataaggaaaaagcacagcaacggctgaaacaggcgcaactgattggcgaaatcagcgcccaaatgaccgagatagcccgtacggaagggaaaattatcgccaccaaagcggcgaaagcgaaactggaccatatcagtgaaccggacaaagaggccgccagaaaaaaactggtcgacagtggcaatccacacccgacttcggcagatatcaataagcaagtttatgacaccgcttacacgcaggcactgaatgactccggcttggggaccggcggaacctatcaaaaagccttacaggccgctacggcagcgattcagggcttagcggggaacaacctcggtcaggcgctggccgggggcgcttcaccgtatctggcgggcgtgataaaagagctaaccaccgacccgcaaacccatcaagtggatatcgccaccaatacgctggcccatgcgattttaggcgcggtggcggcagaagtcagcggtaacaatgcgctcgcgggtgccgcgggtgcggcgtcgggggaactggccgcgcaggtcctgataaagcaactttacggtgatggggccaacgtcagtgagttaacggaggagcagaagcaaactatcagcaccctttccaccctggcagcaggactggcaggcggtattgccggtgactccaccgggagcgctgttaccggggcgcaggcagggaagaacgcaaccgataataatttcctgggaaaactggtaacagaagggtgtgcaatagctgctccgtgtcgagccaaagtggcagaaaaagtcctggagataggcgttaaggcgggtataaccggaatagtggcaaaggaaatcgctgataagatttcttcagaagacttagaccatctgattatgcttcagatgatgggaaatgatgaaatcacacagagttatctaaatacacttcaggataaatacactcaagttgctaatccaactgacctaccaacacataccggcaatacggaaggtaagccggatgtaggtggtaatacgacggtgaccccaattcctgatggcccgaaaaaagatgattttatttatcaggccaaaggagaaaaaccagaaaactattctcctgtaggagcaggtaggtcaggtgcatttaatgaagcaaaacgtcgctcaggaattcctattggaaaacatcctgatagagtattgccaaatgttgataagcgaggaaggctccagcctggaaaaatttatgaatttgatgttcctaaagcaggagggggaactcaaactatacaaattagggatgatgccaaaggtcatgattttggaataaatgatccccagaatagagggcctcattttaatgatgaaaaagggaatcactatgactactgacatgatagttaggtatgctactgatatctgtaaaaataacgatatcactaattttagttctttatttattacagaaatgaatattgaagcggtaagctgggaactattagatctaaatcgcgaaagaggttttgtaccactttttacgaaaatggtagagacgctagaaatttatgatgatagaagttctatttatttatatatagaactatctggcgttcaaccggacacatctattactcggtataaacaagcttggggattattaaaatcaagaggaaatgatacagaattcgcgttaaaaaaacagaatgttatggttcagtcttcacggggcttgactttatcagggttatgtcacttttatctttccgatttaaaaacagcggcaaagttagtattaactgaaaagaaaacatatttggcacttatccccgacgaaaatatttatgagaggttagatataacacaaattcgacatatttcagattgggcaaatttcatttggcaacataatggcatcgttttaatgatattaggtgctttcgatgatcttggctgtgagattgttgcactaggaaggaatgagaatattttttctctaacaaaaggttgttattgagaataactatctgagcgtgaatgagctggacagttttgcgcatcaagcccgcacctgtgaaggcgaaagctgcaaacaagtgatcaaggatatggtagacactaatatccgcaatcagcaggaaatgatggatttctgcaacagcaacccgacccagtgtgcacagaagtatggttatctggttgatcagtggccggtgtttgaacgtaccctcaaaaatatggaccgggatggcacattgccggttgagttcagaaattacctgtcggcggtgaatacgttaggtcaggcggccacaggcaaggtaggcgaactcggctggacaaaacgctttgaggcgatgggcatgagcaaggaaacggccgctgcgatggcgatgacattgccaattgtgatggagggggctaaagggccgaagtcatcgccaacaacaaagggaagcacaggcgcggctgttaatacagagaaaacggcgctggaaaagattgggaaaaacagtcaaggcacaacgaatctgggtgataaatcggataatactgtttatcatcaacagcttatcaaaaatgctgaaaagatatctactgcgaaaccaggacaacaagttgctgcgccaagggatctgaatgagcaaactttctggaaacaggttgaatcaaatccgtcacaaggaagtaaattgttaggtatgaataaagatccccgttttcctacagcggctggttttcagaaaatggaagcaaaacataggctccctaatggacaaacaataactatccattaccagtacaactcaaatactggtaaagcctatgacatgaaaattactactcctcagagaatccaacaggatcctaaaaaggtaatagattcaataaaggataatgttaaatgaaaatacaagaatcagatggctctattgttgatgtttttgccatatattggtttggtgatgaaacatatttttatgggttaccaccaaattatggaggtttacaggcatataagtctcatgaagtctcagttatcgatacaacgatagattttaaaactgtttttttctcaaatgatgatgctaaaagtgttcatcattgggcattaatagaagaacagttgctggatgatctacttgagttagatgaaactgcttatcaacgctttttggcaatcctaaaggcagaaggtaatatagaacaggatttttgttaattaggcgtcccggtcagtggccgggagcttcctgcttttaaccgtcaactg
